United States Patent Application Publication US 2024/0066150 A1 - sequence listing, part 7

SEQ ID NO: 70453 - DNA, 20 bp, synthetic construct
  misc_feature 1..20: note = Description of Artificial Sequence: Synthetic oligonucleotide
  misc_feature 1..20: note = Target: SCN10A; (+) strand; PAM type: YTN; PAM sequence: CTC
  source 1..20: mol_type = other DNA
ttaagattcttttctttgtc

SEQ ID NO: 70454 - DNA, 20 bp, synthetic construct
  misc_feature 1..20: note = Description of Artificial Sequence: Synthetic oligonucleotide
  misc_feature 1..20: note = Target: SCN10A; (+) strand; PAM type: YTN; PAM sequence: CTT
  source 1..20: mol_type = other DNA
aagattcttttctttgtctt

SEQ ID NO: 70455 - DNA, 20 bp, synthetic construct
  misc_feature 1..20: note = Description of Artificial Sequence: Synthetic oligonucleotide
  misc_feature 1..20: note = Target: SCN10A; (+) strand; PAM type: YTN; PAM sequence: TTA
  source 1..20: mol_type = other DNA
agattcttttctttgtcttg

SEQ ID NO: 70456 - DNA, 20 bp, synthetic construct
  misc_feature 1..20: note = Description of Artificial Sequence: Synthetic oligonucleotide
  misc_feature 1..20: note = Target: SCN10A; (+) strand; PAM type: YTN; PAM sequence: TTC
  source 1..20: mol_type = other DNA
ttttctttgtcttgacttta

SEQ ID NO: 70457 - DNA, 20 bp, synthetic construct
  misc_feature 1..20: note = Description of Artificial Sequence: Synthetic oligonucleotide
  misc_feature 1..20: note = Target: SCN10A; (+) strand; PAM type: YTN; PAM sequence: CTT
  source 1..20: mol_type = other DNA
ttctttgtcttgactttaga

SEQ ID NO: 70458 - DNA, 20 bp, synthetic construct
  misc_feature 1..20: note = Description of Artificial Sequence: Synthetic oligonucleotide
  misc_feature 1..20: note = Target: SCN10A; (+) strand; PAM type: YTN; PAM sequence: TTT
  source 1..20: mol_type = other DNA
tctttgtcttgactttagat

SEQ ID NO: 70459 - DNA, 20 bp, synthetic construct
  misc_feature 1..20: note = Description of Artificial Sequence: Synthetic oligonucleotide
  misc_feature 1..20: note = Target: SCN10A; (+) strand; PAM type: YTN; PAM sequence: TTT
  source 1..20: mol_type = other DNA
ctttgtcttgactttagata

SEQ ID NO: 70460 - DNA, 20 bp, synthetic construct
  misc_feature 1..20: note = Description of Artificial Sequence: Synthetic oligonucleotide
  misc_feature 1..20: note = Target: SCN10A; (+) strand; PAM type: YTN; PAM sequence: TTC
  source 1..20: mol_type = other DNA
tttgtcttgactttagataa

SEQ ID NO: 70461 - DNA, 20 bp, synthetic construct
  misc_feature 1..20: note = Description of Artificial Sequence: Synthetic oligonucleotide
  misc_feature 1..20: note = Target: SCN10A; (+) strand; PAM type: YTN; PAM sequence: CTT
  source 1..20: mol_type = other DNA
tgtcttgactttagataacc

SEQ ID NO: 70462 - DNA, 20 bp, synthetic construct
  misc_feature 1..20: note = Description of Artificial Sequence: Synthetic oligonucleotide
  misc_feature 1..20: note = Target: SCN10A; (+) strand; PAM type: YTN; PAM sequence: TTT
  source 1..20: mol_type = other DNA
gtcttgactttagataacct

SEQ ID NO: 70463 - DNA, 20 bp, synthetic construct
  misc_feature 1..20: note = Description of Artificial Sequence: Synthetic oligonucleotide
  misc_feature 1..20: note = Target: SCN10A; (+) strand; PAM type: YTN; PAM sequence: TTG
  source 1..20: mol_type = other DNA
tcttgactttagataacctg

SEQ ID NO: 70464 - DNA, 20 bp, synthetic construct
  misc_feature 1..20: note = Description of Artificial Sequence: Synthetic oligonucleotide
  misc_feature 1..20: note = Target: SCN10A; (+) strand; PAM type: YTN; PAM sequence: CTT
  source 1..20: mol_type = other DNA
gactttagataacctgatgt

SEQ ID NO: 70465 - DNA, 20 bp, synthetic construct
  misc_feature 1..20: note = Description of Artificial Sequence: Synthetic oligonucleotide
  misc_feature 1..20: note = Target: SCN10A; (+) strand; PAM type: YTN; PAM sequence: TTG
  source 1..20: mol_type = other DNA
actttagataacctgatgtc

SEQ ID NO: 70466 - DNA, 20 bp, synthetic construct
  misc_feature 1..20: note = Description of Artificial Sequence: Synthetic oligonucleotide
  misc_feature 1..20: note = Target: SCN10A; (+) strand; PAM type: YTN; PAM sequence: CTT
  source 1..20: mol_type = other DNA
tagataacctgatgtctatt

SEQ ID NO: 70467 - DNA, 20 bp, synthetic construct
  misc_feature 1..20: note = Description of Artificial Sequence: Synthetic oligonucleotide
  misc_feature 1..20: note = Target: SCN10A; (+) strand; PAM type: YTN; PAM sequence: TTT
  source 1..20: mol_type = other DNA
agataacctgatgtctattt

SEQ ID NO: 70468 - DNA, 20 bp, synthetic construct
  misc_feature 1..20: note = Description of Artificial Sequence: Synthetic oligonucleotide
  misc_feature 1..20: note = Target: SCN10A; (+) strand; PAM type: YTN; PAM sequence: TTA
  source 1..20: mol_type = other DNA
gataacctgatgtctatttg

SEQ ID NO: 70469 - DNA, 20 bp, synthetic construct
  misc_feature 1..20: note = Description of Artificial Sequence: Synthetic oligonucleotide
  misc_feature 1..20: note = Target: SCN10A; (+) strand; PAM type: YTN; PAM sequence: CTG
  source 1..20: mol_type = other DNA
atgtctatttgcctaggtga

SEQ ID NO: 70470 - DNA, 20 bp, synthetic construct
  misc_feature 1..20: note = Description of Artificial Sequence: Synthetic oligonucleotide
  misc_feature 1..20: note = Target: SCN10A; (+) strand; PAM type: YTN; PAM sequence: CTA
  source 1..20: mol_type = other DNA
tttgcctaggtgatgatctt

SEQ ID NO: 70471 - DNA, 20 bp, synthetic construct
  misc_feature 1..20: note = Description of Artificial Sequence: Synthetic oligonucleotide
  misc_feature 1..20: note = Target: SCN10A; (+) strand; PAM type: YTN; PAM sequence: TTT
  source 1..20: mol_type = other DNA
gcctaggtgatgatcttttt

SEQ ID NO: 70472 - DNA, 20 bp, synthetic construct
  misc_feature 1..20: note = Description of Artificial Sequence: Synthetic oligonucleotide
  misc_feature 1..20: note = Target: SCN10A; (+) strand; PAM type: YTN; PAM sequence: TTG
  source 1..20: mol_type = other DNA
cctaggtgatgatctttttt

SEQ ID NO: 70473 - DNA, 20 bp, synthetic construct
  misc_feature 1..20: note = Description of Artificial Sequence: Synthetic oligonucleotide
  misc_feature 1..20: note = Target: SCN10A; (+) strand; PAM type: YTN; PAM sequence: CTA
  source 1..20: mol_type = other DNA
ggtgatgatcttttttgtga

SEQ ID NO: 70474 - DNA, 20 bp, synthetic construct
  misc_feature 1..20: note = Description of Artificial Sequence: Synthetic oligonucleotide
  misc_feature 1..20: note = Target: SCN10A; (+) strand; PAM type: YTN; PAM sequence: CTT
  source 1..20: mol_type = other DNA
ttttgtgacacatttcagag

SEQ ID NO: 70475 - DNA, 20 bp, synthetic construct
  misc_feature 1..20: note = Description of Artificial Sequence: Synthetic oligonucleotide
  misc_feature 1..20: note = Target: SCN10A; (+) strand; PAM type: YTN; PAM sequence: TTT
  source 1..20: mol_type = other DNA
tttgtgacacatttcagagg

SEQ ID NO: 70476 - DNA, 20 bp, synthetic construct
  misc_feature 1..20: note = Description of Artificial Sequence: Synthetic oligonucleotide
  misc_feature 1..20: note = Target: SCN10A; (+) strand; PAM type: YTN; PAM sequence: TTT
  source 1..20: mol_type = other DNA
ttgtgacacatttcagaggt

SEQ ID NO: 70477 - DNA, 20 bp, synthetic construct
  misc_feature 1..20: note = Description of Artificial Sequence: Synthetic oligonucleotide
  misc_feature 1..20: note = Target: SCN10A; (+) strand; PAM type: YTN; PAM sequence: TTT
  source 1..20: mol_type = other DNA
tgtgacacatttcagaggta

SEQ ID NO: 70478 - DNA, 20 bp, synthetic construct
  misc_feature 1..20: note = Description of Artificial Sequence: Synthetic oligonucleotide
  misc_feature 1..20: note = Target: SCN10A; (+) strand; PAM type: YTN; PAM sequence: TTT
  source 1..20: mol_type = other DNA
gtgacacatttcagaggtat

SEQ ID NO: 70479 - DNA, 20 bp, synthetic construct
  misc_feature 1..20: note = Description of Artificial Sequence: Synthetic oligonucleotide
  misc_feature 1..20: note = Target: SCN10A; (+) strand; PAM type: YTN; PAM sequence: TTG
  source 1..20: mol_type = other DNA
tgacacatttcagaggtatt

SEQ ID NO: 70480 - DNA, 20 bp, synthetic construct
  misc_feature 1..20: note = Description of Artificial Sequence: Synthetic oligonucleotide
  misc_feature 1..20: note = Target: SCN10A; (+) strand; PAM type: YTN; PAM sequence: TTT
  source 1..20: mol_type = other DNA
cagaggtattctttgagctt

SEQ ID NO: 70481 - DNA, 20 bp, synthetic construct
  misc_feature 1..20: note = Description of Artificial Sequence: Synthetic oligonucleotide
  misc_feature 1..20: note = Target: SCN10A; (+) strand; PAM type: YTN; PAM sequence: TTC
  source 1..20: mol_type = other DNA
agaggtattctttgagcttc

SEQ ID NO: 70482 - DNA, 20 bp, synthetic construct
  misc_feature 1..20: note = Description of Artificial Sequence: Synthetic oligonucleotide
  misc_feature 1..20: note = Target: SCN10A; (+) strand; PAM type: YTN; PAM sequence: TTC
  source 1..20: mol_type = other DNA
tttgagcttcttgtatttgg

SEQ ID NO: 70483 - DNA, 20 bp, synthetic construct
  misc_feature 1..20: note = Description of Artificial Sequence: Synthetic oligonucleotide
  misc_feature 1..20: note = Target: SCN10A; (+) strand; PAM type: YTN; PAM sequence: CTT
  source 1..20: mol_type = other DNA
tgagcttcttgtatttggat

SEQ ID NO: 70484 - DNA, 20 bp, synthetic construct
  misc_feature 1..20: note = Description of Artificial Sequence: Synthetic oligonucleotide
  misc_feature 1..20: note = Target: SCN10A; (+) strand; PAM type: YTN; PAM sequence: TTT
  source 1..20: mol_type = other DNA
gagcttcttgtatttggata

SEQ ID NO: 70485 - DNA, 20 bp, synthetic construct
  misc_feature 1..20: note = Description of Artificial Sequence: Synthetic oligonucleotide
  misc_feature 1..20: note = Target: SCN10A; (+) strand; PAM type: YTN; PAM sequence: TTG
  source 1..20: mol_type = other DNA
agcttcttgtatttggatat

SEQ ID NO: 70486 - DNA, 20 bp, synthetic construct
  misc_feature 1..20: note = Description of Artificial Sequence: Synthetic oligonucleotide
  misc_feature 1..20: note = Target: SCN10A; (+) strand; PAM type: YTN; PAM sequence: CTT
  source 1..20: mol_type = other DNA
cttgtatttggatatctata

SEQ ID NO: 70487 - DNA, 20 bp, synthetic construct
  misc_feature 1..20: note = Description of Artificial Sequence: Synthetic oligonucleotide
  misc_feature 1..20: note = Target: SCN10A; (+) strand; PAM type: YTN; PAM sequence: TTC
  source 1..20: mol_type = other DNA
ttgtatttggatatctatat

SEQ ID NO: 70488 - DNA, 20 bp, synthetic construct
  misc_feature 1..20: note = Description of Artificial Sequence: Synthetic oligonucleotide
  misc_feature 1..20: note = Target: SCN10A; (+) strand; PAM type: YTN; PAM sequence: CTT
  source 1..20: mol_type = other DNA
gtatttggatatctatattt

SEQ ID NO: 70489 - DNA, 20 bp, synthetic construct
  misc_feature 1..20: note = Description of Artificial Sequence: Synthetic oligonucleotide
  misc_feature 1..20: note = Target: SCN10A; (+) strand; PAM type: YTN; PAM sequence: TTG
  source 1..20: mol_type = other DNA
tatttggatatctatatttc

SEQ ID NO: 70490 - DNA, 20 bp, synthetic construct
  misc_feature 1..20: note = Description of Artificial Sequence: Synthetic oligonucleotide
  misc_feature 1..20: note = Target: SCN10A; (+) strand; PAM type: YTN; PAM sequence: TTT
  source 1..20: mol_type = other DNA
ggatatctatatttctaaca

SEQ ID NO: 70491 - DNA, 20 bp, synthetic construct
  misc_feature 1..20: note = Description of Artificial Sequence: Synthetic oligonucleotide
  misc_feature 1..20: note = Target: SCN10A; (+) strand; PAM type: YTN; PAM sequence: TTG
  source 1..20: mol_type = other DNA
gatatctatatttctaacaa

SEQ ID NO: 70492 - DNA, 20 bp, synthetic construct
  misc_feature 1..20: note = Description of Artificial Sequence: Synthetic oligonucleotide
  misc_feature 1..20: note = Target: SCN10A; (+) strand; PAM type: YTN; PAM sequence: CTA
  source 1..20: mol_type = other DNA
tatttctaacaaggccaggg

SEQ ID NO: 70493 - DNA, 20 bp, synthetic construct
  misc_feature 1..20: note = Description of Artificial Sequence: Synthetic oligonucleotide
  misc_feature 1..20: note = Target: SCN10A; (+) strand; PAM type: YTN; PAM sequence: TTT
  source 1..20: mol_type = other DNA
ctaacaaggccagggaagtt

SEQ ID NO: 70494 - DNA, 20 bp, synthetic construct
  misc_feature 1..20: note = Description of Artificial Sequence: Synthetic oligonucleotide
  misc_feature 1..20: note = Target: SCN10A; (+) strand; PAM type: YTN; PAM sequence: TTC
  source 1..20: mol_type = other DNA
taacaaggccagggaagttt

SEQ ID NO: 70495 - DNA, 20 bp, synthetic construct
  misc_feature 1..20: note = Description of Artificial Sequence: Synthetic oligonucleotide
  misc_feature 1..20: note = Target: SCN10A; (+) strand; PAM type: YTN; PAM sequence: CTA
  source 1..20: mol_type = other DNA
acaaggccagggaagttttc

SEQ ID NO: 70496 - DNA, 20 bp, synthetic construct
  misc_feature 1..20: note = Description of Artificial Sequence: Synthetic oligonucleotide
  misc_feature 1..20: note = Target: SCN10A; (+) strand; PAM type: YTN; PAM sequence: TTT
  source 1..20: mol_type = other DNA
tcctcaattattccctcaaa

SEQ ID NO: 70497 - DNA, 20 bp, synthetic construct
  misc_feature 1..20: note = Description of Artificial Sequence: Synthetic oligonucleotide
  misc_feature 1..20: note = Target: SCN10A; (+) strand; PAM type: YTN; PAM sequence: TTT
  source 1..20: mol_type = other DNA
cctcaattattccctcaaat

SEQ ID NO: 70498 - DNA, 20 bp, synthetic construct
  misc_feature 1..20: note = Description of Artificial Sequence: Synthetic oligonucleotide
  misc_feature 1..20: note = Target: SCN10A; (+) strand; PAM type: YTN; PAM sequence: TTC
  source 1..20: mol_type = other DNA
ctcaattattccctcaaata

SEQ ID NO: 70499 - DNA, 20 bp, synthetic construct
  misc_feature 1..20: note = Description of Artificial Sequence: Synthetic oligonucleotide
  misc_feature 1..20: note = Target: SCN10A; (+) strand; PAM type: YTN; PAM sequence: CTC
  source 1..20: mol_type = other DNA
aattattccctcaaataagt

SEQ ID NO: 70500 - DNA, 20 bp, synthetic construct
  misc_feature 1..20: note = Description of Artificial Sequence: Synthetic oligonucleotide
  misc_feature 1..20: note = Target: SCN10A; (+) strand; PAM type: YTN; PAM sequence: TTA
  source 1..20: mol_type = other DNA
ttccctcaaataagttttcc

SEQ ID NO: 70501 - DNA, 20 bp, synthetic construct
  misc_feature 1..20: note = Description of Artificial Sequence: Synthetic oligonucleotide
  misc_feature 1..20: note = Target: SCN10A; (+) strand; PAM type: YTN; PAM sequence: TTC
  source 1..20: mol_type = other DNA
cctcaaataagttttccaaa

SEQ ID NO: 70502 - DNA, 20 bp, synthetic construct
  misc_feature 1..20: note = Description of Artificial Sequence: Synthetic oligonucleotide
  misc_feature 1..20: note = Target: SCN10A; (+) strand; PAM type: YTN; PAM sequence: CTC
  source 1..20: mol_type = other DNA
aaataagttttccaaacttt

SEQ ID NO: 70503 - DNA, 20 bp, synthetic construct
  misc_feature 1..20: note = Description of Artificial Sequence: Synthetic oligonucleotide
  misc_feature 1..20: note = Target: SCN10A; (+) strand; PAM type: YTN; PAM sequence: TTT
  source 1..20: mol_type = other DNA
tccaaacttttagatttcta

SEQ ID NO: 70504 - DNA, 20 bp, synthetic construct
  misc_feature 1..20: note = Description of Artificial Sequence: Synthetic oligonucleotide
  misc_feature 1..20: note = Target: SCN10A; (+) strand; PAM type: YTN; PAM sequence: TTT
  source 1..20: mol_type = other DNA
ccaaacttttagatttctat

SEQ ID NO: 70505 - DNA, 20 bp, synthetic construct
  misc_feature 1..20: note = Description of Artificial Sequence: Synthetic oligonucleotide
  misc_feature 1..20: note = Target: SCN10A; (+) strand; PAM type: YTN; PAM sequence: TTC
  source 1..20: mol_type = other DNA
caaacttttagatttctatt

SEQ ID NO: 70506 - DNA, 20 bp, synthetic construct
  misc_feature 1..20: note = Description of Artificial Sequence: Synthetic oligonucleotide
  misc_feature 1..20: note = Target: SCN10A; (+) strand; PAM type: YTN; PAM sequence: CTT
  source 1..20: mol_type = other DNA
ttagatttctattcttcctt

SEQ ID NO: 70507 - DNA, 20 bp, synthetic construct
  misc_feature 1..20: note = Description of Artificial Sequence: Synthetic oligonucleotide
  misc_feature 1..20: note = Target: SCN10A; (+) strand; PAM type: YTN; PAM sequence: TTT
  source 1..20: mol_type = other DNA
tagatttctattcttccttg

SEQ ID NO: 70508 - DNA, 20 bp, synthetic construct
  misc_feature 1..20: note = Description of Artificial Sequence: Synthetic oligonucleotide
  misc_feature 1..20: note = Target: SCN10A; (+) strand; PAM type: YTN; PAM sequence: TTT
  source 1..20: mol_type = other DNA
agatttctattcttccttgg

SEQ ID NO: 70509 - DNA, 20 bp, synthetic construct
  misc_feature 1..20: note = Description of Artificial Sequence: Synthetic oligonucleotide
  misc_feature 1..20: note = Target: SCN10A; (+) strand; PAM type: YTN; PAM sequence: TTA
  source 1..20: mol_type = other DNA
gatttctattcttccttggg

SEQ ID NO: 70510 - DNA, 20 bp, synthetic construct
  misc_feature 1..20: note = Description of Artificial Sequence: Synthetic oligonucleotide
  misc_feature 1..20: note = Target: SCN10A; (+) strand; PAM type: YTN; PAM sequence: TTT
  source 1..20: mol_type = other DNA
ctattcttccttgggaacac

SEQ ID NO: 70511 - DNA, 20 bp, synthetic construct
  misc_feature 1..20: note = Description of Artificial Sequence: Synthetic oligonucleotide
  misc_feature 1..20: note = Target: SCN10A; (+) strand; PAM type: YTN; PAM sequence: TTC
  source 1..20: mol_type = other DNA
tattcttccttgggaacacc

SEQ ID NO: 70512 - DNA, 20 bp, synthetic construct
  misc_feature 1..20: note = Description of Artificial Sequence: Synthetic oligonucleotide
  misc_feature 1..20: note = Target: SCN10A; (+) strand; PAM type: YTN; PAM sequence: CTA
  source 1..20: mol_type = other DNA
ttcttccttgggaacaccca

SEQ ID NO: 70513 - DNA, 20 bp, synthetic construct
  misc_feature 1..20: note = Description of Artificial Sequence: Synthetic oligonucleotide
  misc_feature 1..20: note = Target: SCN10A; (+) strand; PAM type: YTN; PAM sequence: TTC
  source 1..20: mol_type = other DNA
ttccttgggaacacccatta

SEQ ID NO: 70514 - DNA, 20 bp, synthetic construct
  misc_feature 1..20: note = Description of Artificial Sequence: Synthetic oligonucleotide
  misc_feature 1..20: note = Target: SCN10A; (+) strand; PAM type: YTN; PAM sequence: CTT
  source 1..20: mol_type = other DNA
ccttgggaacacccattatt

SEQ ID NO: 70515 - DNA, 20 bp, synthetic construct
  misc_feature 1..20: note = Description of Artificial Sequence: Synthetic oligonucleotide
  misc_feature 1..20: note = Target: SCN10A; (+) strand; PAM type: YTN; PAM sequence: TTC
  source 1..20: mol_type = other DNA
cttgggaacacccattattc

SEQ ID NO: 70516 - DNA, 20 bp, synthetic construct
  misc_feature 1..20: note = Description of Artificial Sequence: Synthetic oligonucleotide
  misc_feature 1..20: note = Target: SCN10A; (+) strand; PAM type: YTN; PAM sequence: CTT
  source 1..20: mol_type = other DNA
gggaacacccattattctta

SEQ ID NO: 70517 - DNA, 20 bp, synthetic construct
  misc_feature 1..20: note = Description of Artificial Sequence: Synthetic oligonucleotide
  misc_feature 1..20: note = Target: SCN10A; (+) strand; PAM type: YTN; PAM sequence: TTG
  source 1..20: mol_type = other DNA
ggaacacccattattcttag

SEQ ID NO: 70518 - DNA, 20 bp, synthetic construct
  misc_feature 1..20: note = Description of Artificial Sequence: Synthetic oligonucleotide
  misc_feature 1..20: note = Target: SCN10A; (+) strand; PAM type: YTN; PAM sequence: TTA
  source 1..20: mol_type = other DNA
ttcttaggtttggttgtttc

SEQ ID NO: 70519 - DNA, 20 bp, synthetic construct
  misc_feature 1..20: note = Description of Artificial Sequence: Synthetic oligonucleotide
  misc_feature 1..20: note = Target: SCN10A; (+) strand; PAM type: YTN; PAM sequence: TTC
  source 1..20: mol_type = other DNA
ttaggtttggttgtttcaca

SEQ ID NO: 70520 - DNA, 20 bp, synthetic construct
  misc_feature 1..20: note = Description of Artificial Sequence: Synthetic oligonucleotide
  misc_feature 1..20: note = Target: SCN10A; (+) strand; PAM type: YTN; PAM sequence: CTT
  source 1..20: mol_type = other DNA
aggtttggttgtttcacatg

SEQ ID NO: 70521 - DNA, 20 bp, synthetic construct
  misc_feature 1..20: note = Description of Artificial Sequence: Synthetic oligonucleotide
  misc_feature 1..20: note = Target: SCN10A; (+) strand; PAM type: YTN; PAM sequence: TTA
  source 1..20: mol_type = other DNA
ggtttggttgtttcacatga

SEQ ID NO: 70522 - DNA, 20 bp, synthetic construct
  misc_feature 1..20: note = Description of Artificial Sequence: Synthetic oligonucleotide
  misc_feature 1..20: note = Target: SCN10A; (+) strand; PAM type: YTN; PAM sequence: TTT
  source 1..20: mol_type = other DNA
ggttgtttcacatgattcca

SEQ ID NO: 70523 - DNA, 20 bp, synthetic construct
  misc_feature 1..20: note = Description of Artificial Sequence: Synthetic oligonucleotide
  misc_feature 1..20: note = Target: SCN10A; (+) strand; PAM type: YTN; PAM sequence: TTG
  source 1..20: mol_type = other DNA
gttgtttcacatgattccaa

SEQ ID NO: 70524 - DNA, 20 bp, synthetic construct
  misc_feature 1..20: note = Description of Artificial Sequence: Synthetic oligonucleotide
  misc_feature 1..20: note = Target: SCN10A; (+) strand; PAM type: YTN; PAM sequence: TTG
  source 1..20: mol_type = other DNA
tttcacatgattccaaattt

SEQ ID NO: 70525 - DNA, 20 bp, synthetic construct
  misc_feature 1..20: note = Description of Artificial Sequence: Synthetic oligonucleotide
  misc_feature 1..20: note = Target: SCN10A; (+) strand; PAM type: YTN; PAM sequence: TTT
  source 1..20: mol_type = other DNA
cacatgattccaaatttatt

SEQ ID NO: 70526 - DNA, 20 bp, synthetic construct
  misc_feature 1..20: note = Description of Artificial Sequence: Synthetic oligonucleotide
  misc_feature 1..20: note = Target: SCN10A; (+) strand; PAM type: YTN; PAM sequence: TTC
  source 1..20: mol_type = other DNA
acatgattccaaatttattg

SEQ ID NO: 70527 - DNA, 20 bp, synthetic construct
  misc_feature 1..20: note = Description of Artificial Sequence: Synthetic oligonucleotide
  misc_feature 1..20: note = Target: SCN10A; (+) strand; PAM type: YTN; PAM sequence: TTC
  source 1..20: mol_type = other DNA
caaatttattggccgatttg

SEQ ID NO: 70528 - DNA, 20 bp, synthetic construct
  misc_feature 1..20: note = Description of Artificial Sequence: Synthetic oligonucleotide
  misc_feature 1..20: note = Target: SCN10A; (+) strand; PAM type: YTN; PAM sequence: TTT
  source 1..20: mol_type = other DNA
attggccgatttgtcatttt

SEQ ID NO: 70529 - DNA, 20 bp, synthetic construct
  misc_feature 1..20: note = Description of Artificial Sequence: Synthetic oligonucleotide
  misc_feature 1..20: note = Target: SCN10A; (+) strand; PAM type: YTN; PAM sequence: TTA
  source 1..20: mol_type = other DNA
ttggccgatttgtcattttt

SEQ ID NO: 70530 - DNA, 20 bp, synthetic construct
  misc_feature 1..20: note = Description of Artificial Sequence: Synthetic oligonucleotide
  misc_feature 1..20: note = Target: SCN10A; (+) strand; PAM type: YTN; PAM sequence: TTG
  source 1..20: mol_type = other DNA
gccgatttgtcattttttta

SEQ ID NO: 70531 - DNA, 20 bp, synthetic construct
  misc_feature 1..20: note = Description of Artificial Sequence: Synthetic oligonucleotide
  misc_feature 1..20: note = Target: SCN10A; (+) strand; PAM type: YTN; PAM sequence: TTT
  source 1..20: mol_type = other DNA
gtcatttttttaaaaattct

SEQ ID NO: 70532 - DNA, 20 bp, synthetic construct
  misc_feature 1..20: note = Description of Artificial Sequence: Synthetic oligonucleotide
  misc_feature 1..20: note = Target: SCN10A; (+) strand; PAM type: YTN; PAM sequence: TTG
  source 1..20: mol_type = other DNA
tcatttttttaaaaattctt

SEQ ID NO: 70533 - DNA, 20 bp, synthetic construct
  misc_feature 1..20: note = Description of Artificial Sequence: Synthetic oligonucleotide
  misc_feature 1..20: note = Target: SCN10A; (+) strand; PAM type: YTN; PAM sequence: TTT
  source 1..20: mol_type = other DNA
ttttaaaaattctttctttt

SEQ ID NO: 70534 - DNA, 20 bp, synthetic construct
  misc_feature 1..20: note = Description of Artificial Sequence: Synthetic oligonucleotide
  misc_feature 1..20: note = Target: SCN10A; (+) strand; PAM type: YTN; PAM sequence: TTT
  source 1..20: mol_type = other DNA
tttaaaaattctttcttttt

SEQ ID NO: 70535 - DNA, 20 bp, synthetic construct
  misc_feature 1..20: note = Description of Artificial Sequence: Synthetic oligonucleotide
  misc_feature 1..20: note = Target: SCN10A; (+) strand; PAM type: YTN; PAM sequence: TTT
  source 1..20: mol_type = other DNA
ttaaaaattctttctttttg

SEQ ID NO: 70536 - DNA, 20 bp, synthetic construct
  misc_feature 1..20: note = Description of Artificial Sequence: Synthetic oligonucleotide
  misc_feature 1..20: note = Target: SCN10A; (+) strand; PAM type: YTN; PAM sequence: TTT
  source 1..20: mol_type = other DNA
taaaaattctttctttttgt

SEQ ID NO: 70537 - DNA, 20 bp, synthetic construct
  misc_feature 1..20: note = Description of Artificial Sequence: Synthetic oligonucleotide
  misc_feature 1..20: note = Target: SCN10A; (+) strand; PAM type: YTN; PAM sequence: TTT
  source 1..20: mol_type = other DNA
aaaaattctttctttttgtg

SEQ ID NO: 70538 - DNA, 20 bp, synthetic construct
  misc_feature 1..20: note = Description of Artificial Sequence: Synthetic oligonucleotide
  misc_feature 1..20: note = Target: SCN10A; (+) strand; PAM type: YTN; PAM sequence: TTA
  source 1..20: mol_type = other DNA
aaaattctttctttttgtgt

SEQ ID NO: 70539 - DNA, 20 bp, synthetic construct
  misc_feature 1..20: note = Description of Artificial Sequence: Synthetic oligonucleotide
  misc_feature 1..20: note = Target: SCN10A; (+) strand; PAM type: YTN; PAM sequence: TTC
  source 1..20: mol_type = other DNA
tttctttttgtgtgtcttag

SEQ ID NO: 70540 - DNA, 20 bp, synthetic construct
  misc_feature 1..20: note = Description of Artificial Sequence: Synthetic oligonucleotide
  misc_feature 1..20: note = Target: SCN10A; (+) strand; PAM type: YTN; PAM sequence: CTT
  source 1..20: mol_type = other DNA
tctttttgtgtgtcttagtt

SEQ ID NO: 70541 - DNA, 20 bp, synthetic construct
  misc_feature 1..20: note = Description of Artificial Sequence: Synthetic oligonucleotide
  misc_feature 1..20: note = Target: SCN10A; (+) strand; PAM type: YTN; PAM sequence: TTT
  source 1..20: mol_type = other DNA
ctttttgtgtgtcttagttt

SEQ ID NO: 70542 - DNA, 20 bp, synthetic construct
  misc_feature 1..20: note = Description of Artificial Sequence: Synthetic oligonucleotide
  misc_feature 1..20: note = Target: SCN10A; (+) strand; PAM type: YTN; PAM sequence: TTC
  source 1..20: mol_type = other DNA
tttttgtgtgtcttagtttg

SEQ ID NO: 70543 - DNA, 20 bp, synthetic construct
  misc_feature 1..20: note = Description of Artificial Sequence: Synthetic oligonucleotide
  misc_feature 1..20: note = Target: SCN10A; (+) strand; PAM type: YTN; PAM sequence: CTT
  source 1..20: mol_type = other DNA
tttgtgtgtcttagtttggg

SEQ ID NO: 70544 - DNA, 20 bp, synthetic construct
  misc_feature 1..20: note = Description of Artificial Sequence: Synthetic oligonucleotide
  misc_feature 1..20: note = Target: SCN10A; (+) strand; PAM type: YTN; PAM sequence: TTT
  source 1..20: mol_type = other DNA
ttgtgtgtcttagtttgggt

SEQ ID NO: 70545 - DNA, 20 bp, synthetic construct
  misc_feature 1..20: note = Description of Artificial Sequence: Synthetic oligonucleotide
  misc_feature 1..20: note = Target: SCN10A; (+) strand; PAM type: YTN; PAM sequence: TTT
  source 1..20: mol_type = other DNA
tgtgtgtcttagtttgggtc

SEQ ID NO: 70546 - DNA, 20 bp, synthetic construct
  misc_feature 1..20: note = Description of Artificial Sequence: Synthetic oligonucleotide
  misc_feature 1..20: note = Target: SCN10A; (+) strand; PAM type: YTN; PAM sequence: TTT
  source 1..20: mol_type = other DNA
gtgtgtcttagtttgggtct

SEQ ID NO: 70547 - DNA, 20 bp, synthetic construct
  misc_feature 1..20: note = Description of Artificial Sequence: Synthetic oligonucleotide
  misc_feature 1..20: note = Target: SCN10A; (+) strand; PAM type: YTN; PAM sequence: TTG
  source 1..20: mol_type = other DNA
tgtgtcttagtttgggtcta

SEQ ID NO: 70548 - DNA, 20 bp, synthetic construct
  misc_feature 1..20: note = Description of Artificial Sequence: Synthetic oligonucleotide
  misc_feature 1..20: note = Target: SCN10A; (+) strand; PAM type: YTN; PAM sequence: CTT
  source 1..20: mol_type = other DNA
agtttgggtctattaaaagc

SEQ ID NO: 70549 - DNA, 20 bp, synthetic construct
  misc_feature 1..20: note = Description of Artificial Sequence: Synthetic oligonucleotide
  misc_feature 1..20: note = Target: SCN10A; (+) strand; PAM type: YTN; PAM sequence: TTA
  source 1..20: mol_type = other DNA
gtttgggtctattaaaagct

SEQ ID NO: 70550 - DNA, 20 bp, synthetic construct
  misc_feature 1..20: note = Description of Artificial Sequence: Synthetic oligonucleotide
  misc_feature 1..20: note = Target: SCN10A; (+) strand; PAM type: YTN; PAM sequence: TTT
  source 1..20: mol_type = other DNA
gggtctattaaaagctttgt

SEQ ID NO: 70551 - DNA, 20 bp, synthetic construct
  misc_feature 1..20: note = Description of Artificial Sequence: Synthetic oligonucleotide
  misc_feature 1..20: note = Target: SCN10A; (+) strand; PAM type: YTN; PAM sequence: TTG
  source 1..20: mol_type = other DNA
ggtctattaaaagctttgtc

SEQ ID NO: 70552 - DNA, 20 bp, synthetic construct
  misc_feature 1..20: note = Description of Artificial Sequence: Synthetic oligonucleotide
  misc_feature 1..20: note = Target: SCN10A; (+) strand; PAM type: YTN; PAM sequence: CTA
  source 1..20: mol_type = other DNA
ttaaaagctttgtcttcgag

SEQ ID NO: 70553 - DNA, 20 bp, synthetic construct
  misc_feature 1..20: note = Description of Artificial Sequence: Synthetic oligonucleotide
  misc_feature 1..20: note = Target: SCN10A; (+) strand; PAM type: YTN; PAM sequence: TTA
  source 1..20: mol_type = other DNA
aaagctttgtcttcgagctc

SEQ ID NO: 70554 - DNA, 20 bp, synthetic construct
  misc_feature 1..20: note = Description of Artificial Sequence: Synthetic oligonucleotide
  misc_feature 1..20: note = Target: SCN10A; (+) strand; PAM type: YTN; PAM sequence: CTT
  source 1..20: mol_type = other DNA
tgtcttcgagctctgaagtt

SEQ ID NO: 70555 - DNA, 20 bp, synthetic construct
  misc_feature 1..20: note = Description of Artificial Sequence: Synthetic oligonucleotide
  misc_feature 1..20: note = Target: SCN10A; (+) strand; PAM type: YTN; PAM sequence: TTT
  source 1..20: mol_type = other DNA
gtcttcgagctctgaagttc

SEQ ID NO: 70556 - DNA, 20 bp, synthetic construct
  misc_feature 1..20: note = Description of Artificial Sequence: Synthetic oligonucleotide
  misc_feature 1..20: note = Target: SCN10A; (+) strand; PAM type: YTN; PAM sequence: TTG
  source 1..20: mol_type = other DNA
tcttcgagctctgaagttct

SEQ ID NO: 70557 - DNA, 20 bp, synthetic construct
  misc_feature 1..20: note = Description of Artificial Sequence: Synthetic oligonucleotide
  misc_feature 1..20: note = Target: SCN10A; (+) strand; PAM type: YTN; PAM sequence: CTT
  source 1..20: mol_type = other DNA
cgagctctgaagttctttct

SEQ ID NO: 70558 - DNA, 20 bp, synthetic construct
  misc_feature 1..20: note = Description of Artificial Sequence: Synthetic oligonucleotide
  misc_feature 1..20: note = Target: SCN10A; (+) strand; PAM type: YTN; PAM sequence: TTC
  source 1..20: mol_type = other DNA
gagctctgaagttctttctt

SEQ ID NO: 70559 - DNA, 20 bp, synthetic construct
  misc_feature 1..20: note = Description of Artificial Sequence: Synthetic oligonucleotide
  misc_feature 1..20: note = Target: SCN10A; (+) strand; PAM type: YTN; PAM sequence: CTC
  source 1..20: mol_type = other DNA
tgaagttctttcttctactt

SEQ ID NO: 70560 - DNA, 20 bp, synthetic construct
  misc_feature 1..20: note = Description of Artificial Sequence: Synthetic oligonucleotide
  misc_feature 1..20: note = Target: SCN10A; (+) strand; PAM type: YTN; PAM sequence: CTG
  source 1..20: mol_type = other DNA
aagttctttcttctacttgt

SEQ ID NO: 70561 - DNA, 20 bp, synthetic construct
  misc_feature 1..20: note = Description of Artificial Sequence: Synthetic oligonucleotide
  misc_feature 1..20: note = Target: SCN10A; (+) strand; PAM type: YTN; PAM sequence: TTC
  source 1..20: mol_type = other DNA
tttcttctacttgttctagt

SEQ ID NO: 70562 - DNA, 20 bp, synthetic construct
  misc_feature 1..20: note = Description of Artificial Sequence: Synthetic oligonucleotide
  misc_feature 1..20: note = Target: SCN10A; (+) strand; PAM type: YTN; PAM sequence: CTT
  source 1..20: mol_type = other DNA
tcttctacttgttctagtct

SEQ ID NO: 70563 - DNA, 20 bp, synthetic construct
  misc_feature 1..20: note = Description of Artificial Sequence: Synthetic oligonucleotide
  misc_feature 1..20: note = Target: SCN10A; (+) strand; PAM type: YTN; PAM sequence: TTT
  source 1..20: mol_type = other DNA
cttctacttgttctagtcta

SEQ ID NO: 70564 - DNA, 20 bp, synthetic construct
  misc_feature 1..20: note = Description of Artificial Sequence: Synthetic oligonucleotide
  misc_feature 1..20: note = Target: SCN10A; (+) strand; PAM type: YTN; PAM sequence: TTC
  source 1..20: mol_type = other DNA
ttctacttgttctagtctat

SEQ ID NO: 70565 - DNA, 20 bp, synthetic construct
  misc_feature 1..20: note = Description of Artificial Sequence: Synthetic oligonucleotide
  misc_feature 1..20: note = Target: SCN10A; (+) strand; PAM type: YTN; PAM sequence: CTT
  source 1..20: mol_type = other DNA
ctacttgttctagtctattg

SEQ ID NO: 70566 - DNA, 20 bp, synthetic construct
  misc_feature 1..20: note = Description of Artificial Sequence: Synthetic oligonucleotide
  misc_feature 1..20: note = Target: SCN10A; (+) strand; PAM type: YTN; PAM sequence: TTC
  source 1..20: mol_type = other DNA
tacttgttctagtctattgt

SEQ ID NO: 70567 - DNA, 20 bp, synthetic construct
  misc_feature 1..20: note = Description of Artificial Sequence: Synthetic oligonucleotide
  misc_feature 1..20: note = Target: SCN10A; (+) strand; PAM type: YTN; PAM sequence: CTA
  source 1..20: mol_type = other DNA
cttgttctagtctattgttg

SEQ ID NO: 70568 - DNA, 20 bp, synthetic construct
  misc_feature 1..20: note = Description of Artificial Sequence: Synthetic oligonucleotide
  misc_feature 1..20: note = Target: SCN10A; (+) strand; PAM type: YTN; PAM sequence: CTT
  source 1..20: mol_type = other DNA
gttctagtctattgttgaaa

SEQ ID NO: 70569 - DNA, 20 bp, synthetic construct
  misc_feature 1..20: note = Description of Artificial Sequence: Synthetic oligonucleotide
  misc_feature 1..20: note = Target: SCN10A; (+) strand; PAM type: YTN; PAM sequence: TTG
  source 1..20: mol_type = other DNA
ttctagtctattgttgaaac

SEQ ID NO: 70570 - DNA, 20 bp, synthetic construct
  misc_feature 1..20: note = Description of Artificial Sequence: Synthetic oligonucleotide
  misc_feature 1..20: note = Target: SCN10A; (+) strand; PAM type: YTN; PAM sequence: TTC
  source 1..20: mol_type = other DNA
tagtctattgttgaaacttt

SEQ ID NO: 70571 - DNA, 20 bp, synthetic construct
  misc_feature 1..20: note = Description of Artificial Sequence: Synthetic oligonucleotide
  misc_feature 1..20: note = Target: SCN10A; (+) strand; PAM type: YTN; PAM sequence: CTA
  source 1..20: mol_type = other DNA
gtctattgttgaaactttcc

SEQ ID NO: 70572 - DNA, 20 bp, synthetic construct
  misc_feature 1..20: note = Description of Artificial Sequence: Synthetic oligonucleotide
  misc_feature 1..20: note = Target: SCN10A; (+) strand; PAM type: YTN; PAM sequence: CTA
  source 1..20: mol_type = other DNA
ttgttgaaactttccactgc

SEQ ID NO: 70573 - DNA, 20 bp, synthetic construct
  misc_feature 1..20: note = Description of Artificial Sequence: Synthetic oligonucleotide
  misc_feature 1..20: note = Target: SCN10A; (+) strand; PAM type: YTN; PAM sequence: TTG
  source 1..20: mol_type = other DNA
ttgaaactttccactgcatt

SEQ ID NO: 70574 - DNA, 20 bp, synthetic construct
  misc_feature 1..20: note = Description of Artificial Sequence: Synthetic oligonucleotide
  misc_feature 1..20: note = Target: SCN10A; (+) strand; PAM type: YTN; PAM sequence: TTG
  source 1..20: mol_type = other DNA
aaactttccactgcattttg

SEQ ID NO: 70575 - DNA, 20 bp, synthetic construct
  misc_feature 1..20: note = Description of Artificial Sequence: Synthetic oligonucleotide
  misc_feature 1..20: note = Target: SCN10A; (+) strand; PAM type: YTN; PAM sequence: CTT
  source 1..20: mol_type = other DNA
tccactgcattttgtatttc

SEQ ID NO: 70576 - DNA, 20 bp, synthetic construct
  misc_feature 1..20: note = Description of Artificial Sequence: Synthetic oligonucleotide
  misc_feature 1..20: note = Target: SCN10A; (+) strand; PAM type: YTN; PAM sequence: TTT
  source 1..20: mol_type = other DNA
ccactgcattttgtatttct

SEQ ID NO: 70577 - DNA, 20 bp, synthetic construct
  misc_feature 1..20: note = Description of Artificial Sequence: Synthetic oligonucleotide
  misc_feature 1..20: note = Target: SCN10A; (+) strand; PAM type: YTN; PAM sequence: TTC
  source 1..20: mol_type = other DNA
cactgcattttgtatttctc

SEQ ID NO: 70578 - DNA, 20 bp, synthetic construct
  misc_feature 1..20: note = Description of Artificial Sequence: Synthetic oligonucleotide
  misc_feature 1..20: note = Target: SCN10A; (+) strand; PAM type: YTN; PAM sequence: CTG
  source 1..20: mol_type = other DNA
cattttgtatttctctaagt

SEQ ID NO: 70579 - DNA, 20 bp, synthetic construct
  misc_feature 1..20: note = Description of Artificial Sequence: Synthetic oligonucleotide
  misc_feature 1..20: note = Target: SCN10A; (+) strand; PAM type: YTN; PAM sequence: TTT
  source 1..20: mol_type = other DNA
tgtatttctctaagtgagtc

SEQ ID NO: 70580 - DNA, 20 bp, synthetic construct
  misc_feature 1..20: note = Description of Artificial Sequence: Synthetic oligonucleotide
  misc_feature 1..20: note = Target: SCN10A; (+) strand; PAM type: YTN; PAM sequence: TTT
  source 1..20: mol_type = other DNA
gtatttctctaagtgagtct

SEQ ID NO: 70581 - DNA, 20 bp, synthetic construct
  misc_feature 1..20: note = Description of Artificial Sequence: Synthetic oligonucleotide
  misc_feature 1..20: note = Target: SCN10A; (+) strand; PAM type: YTN; PAM sequence: TTG
  source 1..20: mol_type = other DNA
tatttctctaagtgagtctt

SEQ ID NO: 70582 - DNA, 20 bp, synthetic construct
  misc_feature 1..20: note = Description of Artificial Sequence: Synthetic oligonucleotide
  misc_feature 1..20: note = Target: SCN10A; (+) strand; PAM type: YTN; PAM sequence: TTT
  source 1..20: mol_type = other DNA
ctctaagtgagtcttccatt

SEQ ID NO: 70583 - DNA, 20 bp, synthetic construct
  misc_feature 1..20: note = Description of Artificial Sequence: Synthetic oligonucleotide
  misc_feature 1..20: note = Target: SCN10A; (+) strand; PAM type: YTN; PAM sequence: TTC
  source 1..20: mol_type = other DNA
tctaagtgagtcttccattt

SEQ ID NO: 70584 - DNA, 20 bp, synthetic construct
  misc_feature 1..20: note = Description of Artificial Sequence: Synthetic oligonucleotide
  misc_feature 1..20: note = Target: SCN10A; (+) strand; PAM type: YTN; PAM sequence: CTC
  source 1..20: mol_type = other DNA
taagtgagtcttccatttcc

SEQ ID NO: 70585 - DNA, 20 bp, synthetic construct
  misc_feature 1..20: note = Description of Artificial Sequence: Synthetic oligonucleotide
  misc_feature 1..20: note = Target: SCN10A; (+) strand; PAM type: YTN; PAM sequence: CTA
  source 1..20: mol_type = other DNA
agtgagtcttccatttccag

SEQ ID NO: 70586 - DNA, 20 bp, synthetic construct
  misc_feature 1..20: note = Description of Artificial Sequence: Synthetic oligonucleotide
  misc_feature 1..20: note = Target: SCN10A; (+) strand; PAM type: YTN; PAM sequence: CTT
  source 1..20: mol_type = other DNA
ccatttccagaagttgtgat

SEQ ID NO: 70587 - DNA, 20 bp, synthetic construct
  misc_feature 1..20: note = Description of Artificial Sequence: Synthetic oligonucleotide
  misc_feature 1..20: note = Target: SCN10A; (+) strand; PAM type: YTN; PAM sequence: TTC
  source 1..20: mol_type = other DNA
catttccagaagttgtgatt

SEQ ID NO: 70588 - DNA, 20 bp, synthetic construct
  misc_feature 1..20: note = Description of Artificial Sequence: Synthetic oligonucleotide
  misc_feature 1..20: note = Target: SCN10A; (+) strand; PAM type: YTN; PAM sequence: TTT
  source 1..20: mol_type = other DNA
ccagaagttgtgattgtttt

SEQ ID NO: 70589 - DNA, 20 bp, synthetic construct
  misc_feature 1..20: note = Description of Artificial Sequence: Synthetic oligonucleotide
  misc_feature 1..20: note = Target: SCN10A; (+) strand; PAM type: YTN; PAM sequence: TTC
  source 1..20: mol_type = other DNA
cagaagttgtgattgttttt

SEQ ID NO: 70590 - DNA, 20 bp, synthetic construct
  misc_feature 1..20: note = Description of Artificial Sequence: Synthetic oligonucleotide
  misc_feature 1..20: note = Target: SCN10A; (+) strand; PAM type: YTN; PAM sequence: TTG
  source 1..20: mol_type = other DNA
tgattgttttttctttatat

SEQ ID NO: 70591 - DNA, 20 bp, synthetic construct
  misc_feature 1..20: note = Description of Artificial Sequence: Synthetic oligonucleotide
  misc_feature 1..20: note = Target: SCN10A; (+) strand; PAM type: YTN; PAM sequence: TTG
  source 1..20: mol_type = other DNA
ttttttctttatatctattt

SEQ ID NO: 70592 - DNA, 20 bp, synthetic construct
  misc_feature 1..20: note = Description of Artificial Sequence: Synthetic oligonucleotide
  misc_feature 1..20: note = Target: SCN10A; (+) strand; PAM type: YTN; PAM sequence: TTT
  source 1..20: mol_type = other DNA
tttctttatatctatttctc

SEQ ID NO: 70593 - DNA, 20 bp, synthetic construct
  misc_feature 1..20: note = Description of Artificial Sequence: Synthetic oligonucleotide
  misc_feature 1..20: note = Target: SCN10A; (+) strand; PAM type: YTN; PAM sequence: TTT
  source 1..20: mol_type = other DNA
ttctttatatctatttctct

SEQ ID NO: 70594 - DNA, 20 bp, synthetic construct
  misc_feature 1..20: note = Description of Artificial Sequence: Synthetic oligonucleotide
  misc_feature 1..20: note = Target: SCN10A; (+) strand; PAM type: YTN; PAM sequence: TTT
  source 1..20: mol_type = other DNA
tctttatatctatttctctg

SEQ ID NO: 70595 - DNA, 20 bp, synthetic construct
  misc_feature 1..20: note = Description of Artificial Sequence: Synthetic oligonucleotide
  misc_feature 1..20: note = Target: SCN10A; (+) strand; PAM type: YTN; PAM sequence: TTT
  source 1..20: mol_type = other DNA
ctttatatctatttctctgg

SEQ ID NO: 70596 - DNA, 20 bp, synthetic construct
  misc_feature 1..20: note = Description of Artificial Sequence: Synthetic oligonucleotide
  misc_feature 1..20: note = Target: SCN10A; (+) strand; PAM type: YTN; PAM sequence: TTC
  source 1..20: mol_type = other DNA
tttatatctatttctctgga

SEQ ID NO: 70597 - DNA, 20 bp, synthetic construct
  misc_feature 1..20: note = Description of Artificial Sequence: Synthetic oligonucleotide
  misc_feature 1..20: note = Target: SCN10A; (+) strand; PAM type: YTN; PAM sequence: CTT
  source 1..20: mol_type = other DNA
tatatctatttctctggaga

SEQ ID NO: 70598 - DNA, 20 bp, synthetic construct
  misc_feature 1..20: note = Description of Artificial Sequence: Synthetic oligonucleotide
  misc_feature 1..20: note = Target: SCN10A; (+) strand; PAM type: YTN; PAM sequence: TTT
  source 1..20: mol_type = other DNA
atatctatttctctggagaa

SEQ ID NO: 70599 - DNA, 20 bp, synthetic construct
  misc_feature 1..20: note = Description of Artificial Sequence: Synthetic oligonucleotide
  misc_feature 1..20: note = Target: SCN10A; (+) strand; PAM type: YTN; PAM sequence: TTA
  source 1..20: mol_type = other DNA
tatctatttctctggagaat

SEQ ID NO: 70600 - DNA, 20 bp, synthetic construct
  misc_feature 1..20: note = Description of Artificial Sequence: Synthetic oligonucleotide
  misc_feature 1..20: note = Target: SCN10A; (+) strand; PAM type: YTN; PAM sequence: CTA
  source 1..20: mol_type = other DNA
tttctctggagaattttcca

SEQ ID NO: 70601 - DNA, 20 bp, synthetic construct
  misc_feature 1..20: note = Description of Artificial Sequence: Synthetic oligonucleotide
  misc_feature 1..20: note = Target: SCN10A; (+) strand; PAM type: YTN; PAM sequence: TTT
  source 1..20: mol_type = other DNA
ctctggagaattttccatcc

SEQ ID NO: 70602 - DNA, 20 bp, synthetic construct
  misc_feature 1..20: note = Description of Artificial Sequence: Synthetic oligonucleotide
  misc_feature 1..20: note = Target: SCN10A; (+) strand; PAM type: YTN; PAM sequence: TTC
  source 1..20: mol_type = other DNA
tctggagaattttccatcca

SEQ ID NO: 70603 - DNA, 20 bp, synthetic construct
  misc_feature 1..20: note = Description of Artificial Sequence: Synthetic oligonucleotide
  misc_feature 1..20: note = Target: SCN10A; (+) strand; PAM type: YTN; PAM sequence: CTC
  source 1..20: mol_type = other DNA
tggagaattttccatccata

SEQ ID NO: 70604 - DNA, 20 bp, synthetic construct
  misc_feature 1..20: note = Description of Artificial Sequence: Synthetic oligonucleotide
  misc_feature 1..20: note = Target: SCN10A; (+) strand; PAM type: YTN; PAM sequence: CTG
  source 1..20: mol_type = other DNA
gagaattttccatccatatc

SEQ ID NO: 70605 - DNA, 20 bp, synthetic construct
  misc_feature 1..20: note = Description of Artificial Sequence: Synthetic oligonucleotide
  misc_feature 1..20: note = Target: SCN10A; (+) strand; PAM type: YTN; PAM sequence: TTT
  source 1..20: mol_type = other DNA
tccatccatatcttgttgtt

SEQ ID NO: 70606 - DNA, 20 bp, synthetic construct
  misc_feature 1..20: note = Description of Artificial Sequence: Synthetic oligonucleotide
  misc_feature 1..20: note = Target: SCN10A; (+) strand; PAM type: YTN; PAM sequence: TTT
  source 1..20: mol_type = other DNA
ccatccatatcttgttgttt

SEQ ID NO: 70607 - DNA, 20 bp, synthetic construct
  misc_feature 1..20: note = Description of Artificial Sequence: Synthetic oligonucleotide
  misc_feature 1..20: note = Target: SCN10A; (+) strand; PAM type: YTN; PAM sequence: TTC
  source 1..20: mol_type = other DNA
catccatatcttgttgtttt

SEQ ID NO: 70608 - DNA, 20 bp, synthetic construct
  misc_feature 1..20: note = Description of Artificial Sequence: Synthetic oligonucleotide
  misc_feature 1..20: note = Target: SCN10A; (+) strand; PAM type: YTN; PAM sequence: CTT
  source 1..20: mol_type = other DNA
gttgttttaaaaatttcttt

SEQ ID NO: 70609 - DNA, 20 bp, synthetic construct
  misc_feature 1..20: note = Description of Artificial Sequence: Synthetic oligonucleotide
  misc_feature 1..20: note = Target: SCN10A; (+) strand; PAM type: YTN; PAM sequence: TTG
  source 1..20: mol_type = other DNA
ttgttttaaaaatttcttta

SEQ ID NO: 70610 - DNA, 20 bp, synthetic construct
  misc_feature 1..20: note = Description of Artificial Sequence: Synthetic oligonucleotide
  misc_feature 1..20: note = Target: SCN10A; (+) strand; PAM type: YTN; PAM sequence: TTG
  source 1..20: mol_type = other DNA
ttttaaaaatttctttaagt

SEQ ID NO: 70611 - DNA, 20 bp, synthetic construct
  misc_feature 1..20: note = Description of Artificial Sequence: Synthetic oligonucleotide
  misc_feature 1..20: note = Target: SCN10A; (+) strand; PAM type: YTN; PAM sequence: TTT
  source 1..20: mol_type = other DNA
taaaaatttctttaagttgg

SEQ ID NO: 70612 - DNA, 20 bp, synthetic construct
  misc_feature 1..20: note = Description of Artificial Sequence: Synthetic oligonucleotide
  misc_feature 1..20: note = Target: SCN10A; (+) strand; PAM type: YTN; PAM sequence: TTT
  source 1..20: mol_type = other DNA
aaaaatttctttaagttggt

SEQ ID NO: 70613 - DNA, 20 bp, synthetic construct
  misc_feature 1..20: note = Description of Artificial Sequence: Synthetic oligonucleotide
  misc_feature 1..20: note = Target: SCN10A; (+) strand; PAM type: YTN; PAM sequence: TTA
  source 1..20: mol_type = other DNA
aaaatttctttaagttggtt

SEQ ID NO: 70614 - DNA, 20 bp, synthetic construct
  misc_feature 1..20: note = Description of Artificial Sequence: Synthetic oligonucleotide
  misc_feature 1..20: note = Target: SCN10A; (+) strand; PAM type: YTN; PAM sequence: TTT
  source 1..20: mol_type = other DNA
ctttaagttggtttttatct

SEQ ID NO: 70615 - DNA, 20 bp, synthetic construct
  misc_feature 1..20: note = Description of Artificial Sequence: Synthetic oligonucleotide
  misc_feature 1..20: note = Target: SCN10A; (+) strand; PAM type: YTN; PAM sequence: TTC
  source 1..20: mol_type = other DNA
tttaagttggtttttatctt

SEQ ID NO: 70616 - DNA, 20 bp, synthetic construct
  misc_feature 1..20: note = Description of Artificial Sequence: Synthetic oligonucleotide
  misc_feature 1..20: note = Target: SCN10A; (+) strand; PAM type: YTN; PAM sequence: CTT
  source 1..20: mol_type = other DNA
taagttggtttttatctttc

SEQ ID NO: 70617 - DNA, 20 bp, synthetic construct
  misc_feature 1..20: note = Description of Artificial Sequence: Synthetic oligonucleotide
  misc_feature 1..20: note = Target: SCN10A; (+) strand; PAM type: YTN; PAM sequence: TTT
  source 1..20: mol_type = other DNA
aagttggtttttatctttct

SEQ ID NO: 70618 - DNA, 20 bp, synthetic construct
  misc_feature 1..20: note = Description of Artificial Sequence: Synthetic oligonucleotide
  misc_feature 1..20: note = Target: SCN10A; (+) strand; PAM type: YTN; PAM sequence: TTA
  source 1..20: mol_type = other DNA
agttggtttttatctttctc

SEQ ID NO: 70619 - DNA, 20 bp, synthetic construct
  misc_feature 1..20: note = Description of Artificial Sequence: Synthetic oligonucleotide
  misc_feature 1..20: note = Target: SCN10A; (+) strand; PAM type: YTN; PAM sequence: TTG
  source 1..20: mol_type = other DNA
gtttttatctttctctggtg

SEQ ID NO: 70620 - DNA, 20 bp, synthetic construct
  misc_feature 1..20: note = Description of Artificial Sequence: Synthetic oligonucleotide
  misc_feature 1..20: note = Target: SCN10A; (+) strand; PAM type: YTN; PAM sequence: TTT
  source 1..20: mol_type = other DNA
ttatctttctctggtgtctc

SEQ ID NO: 70621 - DNA, 20 bp, synthetic construct
  misc_feature 1..20: note = Description of Artificial Sequence: Synthetic oligonucleotide
  misc_feature 1..20: note = Target: SCN10A; (+) strand; PAM type: YTN; PAM sequence: TTT
  source 1..20: mol_type = other DNA
tatctttctctggtgtctcc

SEQ ID NO: 70622 - DNA, 20 bp, synthetic construct
  misc_feature 1..20: note = Description of Artificial Sequence: Synthetic oligonucleotide
  misc_feature 1..20: note = Target: SCN10A; (+) strand; PAM type: YTN; PAM sequence: TTT
  source 1..20: mol_type = other DNA
atctttctctggtgtctcct

SEQ ID NO: 70623 - DNA, 20 bp, synthetic construct
  misc_feature 1..20: note = Description of Artificial Sequence: Synthetic oligonucleotide
  misc_feature 1..20: note = Target: SCN10A; (+) strand; PAM type: YTN; PAM sequence: TTA
  source 1..20: mol_type = other DNA
tctttctctggtgtctcctt

SEQ ID NO: 70624 - DNA, 20 bp, synthetic construct
  misc_feature 1..20: note = Description of Artificial Sequence: Synthetic oligonucleotide
  misc_feature 1..20: note = Target: SCN10A; (+) strand; PAM type: YTN; PAM sequence: CTT
  source 1..20: mol_type = other DNA
tctctggtgtctccttgaat

SEQ ID NO: 70625 - DNA, 20 bp, synthetic construct
  misc_feature 1..20: note = Description of Artificial Sequence: Synthetic oligonucleotide
  misc_feature 1..20: note = Target: SCN10A; (+) strand; PAM type: YTN; PAM sequence: TTT
  source 1..20: mol_type = other DNA
ctctggtgtctccttgaatc

SEQ ID NO: 70626 - DNA, 20 bp, synthetic construct
  misc_feature 1..20: note = Description of Artificial Sequence: Synthetic oligonucleotide
  misc_feature 1..20: note = Target: SCN10A; (+) strand; PAM type: YTN; PAM sequence: TTC
  source 1..20: mol_type = other DNA
tctggtgtctccttgaatca

SEQ ID NO: 70627 - DNA, 20 bp, synthetic construct
  misc_feature 1..20: note = Description of Artificial Sequence: Synthetic oligonucleotide
  misc_feature 1..20: note = Target: SCN10A; (+) strand; PAM type: YTN; PAM sequence: CTC
  source 1..20: mol_type = other DNA
tggtgtctccttgaatcact

SEQ ID NO: 70628 - DNA, 20 bp, synthetic construct
  misc_feature 1..20: note = Description of Artificial Sequence: Synthetic oligonucleotide
  misc_feature 1..20: note = Target: SCN10A; (+) strand; PAM type: YTN; PAM sequence: CTG
  source 1..20: mol_type = other DNA
gtgtctccttgaatcactta

SEQ ID NO: 70629 - DNA, 20 bp, synthetic construct
  misc_feature 1..20: note = Description of Artificial Sequence: Synthetic oligonucleotide
  misc_feature 1..20: note = Target: SCN10A; (+) strand; PAM type: YTN; PAM sequence: CTC
  source 1..20: mol_type = other DNA
cttgaatcacttaataatca

SEQ ID NO: 70630 - DNA, 20 bp, synthetic construct
  misc_feature 1..20: note = Description of Artificial Sequence: Synthetic oligonucleotide
  misc_feature 1..20: note = Target: SCN10A; (+) strand; PAM type: YTN; PAM sequence: CTT
  source 1..20: mol_type = other DNA
gaatcacttaataatcagcc

SEQ ID NO: 70631 - DNA, 20 bp, synthetic construct
  misc_feature 1..20: note = Description of Artificial Sequence: Synthetic oligonucleotide
  misc_feature 1..20: note = Target: SCN10A; (+) strand; PAM type: YTN; PAM sequence: TTG
  source 1..20: mol_type = other DNA
aatcacttaataatcagcct

SEQ ID NO: 70632 - DNA, 20 bp, synthetic construct
  misc_feature 1..20: note = Description of Artificial Sequence: Synthetic oligonucleotide
  misc_feature 1..20: note = Target: SCN10A; (+) strand; PAM type: YTN; PAM sequence: CTT
  source 1..20: mol_type = other DNA
aataatcagccttctgaatt

SEQ ID NO: 70633 - DNA, 20 bp, synthetic construct
  misc_feature 1..20: note = Description of Artificial Sequence: Synthetic oligonucleotide
  misc_feature 1..20: note = Target: SCN10A; (+) strand; PAM type: YTN; PAM sequence: TTA
  source 1..20: mol_type = other DNA
ataatcagccttctgaattc

SEQ ID NO: 70634 - DNA, 20 bp, synthetic construct
  misc_feature 1..20: note = Description of Artificial Sequence: Synthetic oligonucleotide
  misc_feature 1..20: note = Target: SCN10A; (+) strand; PAM type: YTN; PAM sequence: CTT
  source 1..20: mol_type = other DNA
ctgaattctttttttttttt

SEQ ID NO: 70635 - DNA, 20 bp, synthetic construct
  misc_feature 1..20: note = Description of Artificial Sequence: Synthetic oligonucleotide
  misc_feature 1..20: note = Target: SCN10A; (+) strand; PAM type: YTN; PAM sequence: TTC
  source 1..20: mol_type = other DNA
tgaattcttttttttttttt

SEQ ID NO: 70636 - DNA, 20 bp, synthetic construct
  misc_feature 1..20: note = Description of Artificial Sequence: Synthetic oligonucleotide
  misc_feature 1..20: note = Target: SCN10A; (+) strand; PAM type: YTN; PAM sequence: CTG
  source 1..20: mol_type = other DNA
aattcttttttttttttttt

SEQ ID NO: 70637 - DNA, 20 bp, synthetic construct
  misc_feature 1..20: note = Description of Artificial Sequence: Synthetic oligonucleotide
  misc_feature 1..20: note = Target: SCN10A; (+) strand; PAM type: YTN; PAM sequence: TTC
  source 1..20: mol_type = other DNA
ttttttttttttttttgaga

SEQ ID NO: 70638 - DNA, 20 bp, synthetic construct
  misc_feature 1..20: note = Description of Artificial Sequence: Synthetic oligonucleotide
  misc_feature 1..20: note = Target: SCN10A; (+) strand; PAM type: YTN; PAM sequence: CTT
  source 1..20: mol_type = other DNA
ttttttttttttttgagatg

SEQ ID NO: 70639 - DNA, 20 bp, synthetic construct
  misc_feature 1..20: note = Description of Artificial Sequence: Synthetic oligonucleotide
  misc_feature 1..20: note = Target: SCN10A; (+) strand; PAM type: YTN; PAM sequence: TTT
  source 1..20: mol_type = other DNA
tttttttttttttgagatgg

SEQ ID NO: 70640 - DNA, 20 bp, synthetic construct
  misc_feature 1..20: note = Description of Artificial Sequence: Synthetic oligonucleotide
  misc_feature 1..20: note = Target: SCN10A; (+) strand; PAM type: YTN; PAM sequence: TTT
  source 1..20: mol_type = other DNA
ttttttttttttgagatgga

SEQ ID NO: 70641 - DNA, 20 bp, synthetic construct
  misc_feature 1..20: note = Description of Artificial Sequence: Synthetic oligonucleotide
  misc_feature 1..20: note = Target: SCN10A; (+) strand; PAM type: YTN; PAM sequence: TTT
  source 1..20: mol_type = other DNA
tttttttttttgagatggat

SEQ ID NO: 70642 - DNA, 20 bp, synthetic construct
  misc_feature 1..20: note = Description of Artificial Sequence: Synthetic oligonucleotide
  misc_feature 1..20: note = Target: SCN10A; (+) strand; PAM type: YTN; PAM sequence: TTT
  source 1..20: mol_type = other DNA
ttttttttttgagatggatt

SEQ ID NO: 70643 - DNA, 20 bp, synthetic construct
  misc_feature 1..20: note = Description of Artificial Sequence: Synthetic oligonucleotide
  misc_feature 1..20: note = Target: SCN10A; (+) strand; PAM type: YTN; PAM sequence: TTT
  source 1..20: mol_type = other DNA
tttttttttgagatggattt

SEQ ID NO: 70644 - DNA, 20 bp, synthetic construct
  misc_feature 1..20: note = Description of Artificial Sequence: Synthetic oligonucleotide
  misc_feature 1..20: note = Target: SCN10A; (+) strand; PAM type: YTN; PAM sequence: TTT
  source 1..20: mol_type = other DNA
ttttttttgagatggatttt

SEQ ID NO: 70645 - DNA, 20 bp, synthetic construct
  misc_feature 1..20: note = Description of Artificial Sequence: Synthetic oligonucleotide
  misc_feature 1..20: note = Target: SCN10A; (+) strand; PAM type: YTN; PAM sequence: TTT
  source 1..20: mol_type = other DNA
tttttttgagatggattttc

SEQ ID NO: 70646 - DNA, 20 bp, synthetic construct
  misc_feature 1..20: note = Description of Artificial Sequence: Synthetic oligonucleotide
  misc_feature 1..20: note = Target: SCN10A; (+) strand; PAM type: YTN; PAM sequence: TTT
  source 1..20: mol_type = other DNA
ttttttgagatggattttca

SEQ ID NO: 70647 - DNA, 20 bp, synthetic construct
  misc_feature 1..20: note = Description of Artificial Sequence: Synthetic oligonucleotide
  misc_feature 1..20: note = Target: SCN10A; (+) strand; PAM type: YTN; PAM sequence: TTT
  source 1..20: mol_type = other DNA
tttttgagatggattttcac

SEQ ID NO: 70648 - DNA, 20 bp, synthetic construct
  misc_feature 1..20: note = Description of Artificial Sequence: Synthetic oligonucleotide
  misc_feature 1..20: note = Target: SCN10A; (+) strand; PAM type: YTN; PAM sequence: TTT
  source 1..20: mol_type = other DNA
ttttgagatggattttcact

SEQ ID NO: 70649 - DNA, 20 bp, synthetic construct
  misc_feature 1..20: note = Description of Artificial Sequence: Synthetic oligonucleotide
  misc_feature 1..20: note = Target: SCN10A; (+) strand; PAM type: YTN; PAM sequence: TTT
  source 1..20: mol_type = other DNA
tttgagatggattttcactc

SEQ ID NO: 70650 - DNA, 20 bp, synthetic construct
  misc_feature 1..20: note = Description of Artificial Sequence: Synthetic oligonucleotide
  misc_feature 1..20: note = Target: SCN10A; (+) strand; PAM type: YTN; PAM sequence: TTT
  source 1..20: mol_type = other DNA
ttgagatggattttcactct

SEQ ID NO: 70651 - DNA, 20 bp, synthetic construct
  misc_feature 1..20: note = Description of Artificial Sequence: Synthetic oligonucleotide
  misc_feature 1..20: note = Target: SCN10A; (+) strand; PAM type: YTN; PAM sequence: TTT
  source 1..20: mol_type = other DNA
tgagatggattttcactctt

SEQ ID NO: 70652 - DNA, 20 bp, synthetic construct
  misc_feature 1..20: note = Description of Artificial Sequence: Synthetic oligonucleotide
  misc_feature 1..20: note = Target: SCN10A; (+) strand; PAM type: YTN; PAM sequence: TTT
  source 1..20: mol_type = other DNA
gagatggattttcactcttg

SEQ ID NO: 70653 - DNA, 20 bp, synthetic construct
  misc_feature 1..20: note = Description of Artificial Sequence: Synthetic oligonucleotide
  misc_feature 1..20: note = Target: SCN10A; (+) strand; PAM type: YTN; PAM sequence: TTG
  source 1..20: mol_type = other DNA
agatggattttcactcttgt

SEQ ID NO: 70654 - DNA, 20 bp, synthetic construct
  misc_feature 1..20: note = Description of Artificial Sequence: Synthetic oligonucleotide
  misc_feature 1..20: note = Target: SCN10A; (+) strand; PAM type: YTN; PAM sequence: TTT
  source 1..20: mol_type = other DNA
tcactcttgttgcccaggct

SEQ ID NO: 70655 - DNA, 20 bp, synthetic construct
  misc_feature 1..20: note = Description of Artificial Sequence: Synthetic oligonucleotide
  misc_feature 1..20: note = Target: SCN10A; (+) strand; PAM type: YTN; PAM sequence: TTT
  source 1..20: mol_type = other DNA
cactcttgttgcccaggctg

SEQ ID NO: 70656 - DNA, 20 bp, synthetic construct
  misc_feature 1..20: note = Description of Artificial Sequence: Synthetic oligonucleotide
  misc_feature 1..20: note = Target: SCN10A; (+) strand; PAM type: YTN; PAM sequence: TTC
  source 1..20: mol_type = other DNA
actcttgttgcccaggctgg

SEQ ID NO: 70657 - DNA, 20 bp, synthetic construct
  misc_feature 1..20: note = Description of Artificial Sequence: Synthetic oligonucleotide
  misc_feature 1..20: note = Target: SCN10A; (+) strand; PAM type: YTN; PAM sequence: CTC
  source 1..20: mol_type = other DNA
ttgttgcccaggctggagtg

SEQ ID NO: 70658 - DNA, 20 bp, synthetic construct
  misc_feature 1..20: note = Description of Artificial Sequence: Synthetic oligonucleotide
  misc_feature 1..20: note = Target: SCN10A; (+) strand; PAM type: YTN; PAM sequence: CTT
  source 1..20: mol_type = other DNA
gttgcccaggctggagtgca

SEQ ID NO: 70659 - DNA, 20 bp, synthetic construct
  misc_feature 1..20: note = Description of Artificial Sequence: Synthetic oligonucleotide
  misc_feature 1..20: note = Target: SCN10A; (+) strand; PAM type: YTN; PAM sequence: TTG
  source 1..20: mol_type = other DNA
ttgcccaggctggagtgcaa

SEQ ID NO: 70660 - DNA, 20 bp, synthetic construct
  misc_feature 1..20: note = Description of Artificial Sequence: Synthetic oligonucleotide
  misc_feature 1..20: note = Target: SCN10A; (+) strand; PAM type: YTN; PAM sequence: TTG
  source 1..20: mol_type = other DNA
cccaggctggagtgcaatgg

SEQ ID NO: 70661 - DNA, 20 bp, synthetic construct
  misc_feature 1..20: note = Description of Artificial Sequence: Synthetic oligonucleotide
  misc_feature 1..20: note = Target: SCN10A; (+) strand; PAM type: YTN; PAM sequence: CTG
  source 1..20: mol_type = other DNA
gagtgcaatggcgcgatctc

SEQ ID NO: 70662 - DNA, 20 bp, synthetic construct
  misc_feature 1..20: note = Description of Artificial Sequence: Synthetic oligonucleotide
  misc_feature 1..20: note = Target: SCN10A; (+) strand; PAM type: YTN; PAM sequence: CTC
  source 1..20: mol_type = other DNA
agctcaccgcaacctctgcc

SEQ ID NO: 70663 - DNA, 20 bp, synthetic construct
  misc_feature 1..20: note = Description of Artificial Sequence: Synthetic oligonucleotide
  misc_feature 1..20: note = Target: SCN10A; (+) strand; PAM type: YTN; PAM sequence: CTC
  source 1..20: mol_type = other DNA
accgcaacctctgcctccca

SEQ ID NO: 70664 - DNA, 20 bp, synthetic construct
  misc_feature 1..20: note = Description of Artificial Sequence: Synthetic oligonucleotide
  misc_feature 1..20: note = Target: SCN10A; (+) strand; PAM type: YTN; PAM sequence: CTC
  source 1..20: mol_type = other DNA
tgcctcccaggttcaagcaa

SEQ ID NO: 70665 - DNA, 20 bp, synthetic construct
  misc_feature 1..20: note = Description of Artificial Sequence: Synthetic oligonucleotide
  misc_feature 1..20: note = Target: SCN10A; (+) strand; PAM type: YTN; PAM sequence: CTG
  source 1..20: mol_type = other DNA
cctcccaggttcaagcaatt

SEQ ID NO: 70666 - DNA, 20 bp, synthetic construct
  misc_feature 1..20: note = Description of Artificial Sequence: Synthetic oligonucleotide
  misc_feature 1..20: note = Target: SCN10A; (+) strand; PAM type: YTN; PAM sequence: CTC
  source 1..20: mol_type = other DNA
ccaggttcaagcaattctcc

SEQ ID NO: 70667 - DNA, 20 bp, synthetic construct
  misc_feature 1..20: note = Description of Artificial Sequence: Synthetic oligonucleotide
  misc_feature 1..20: note = Target: SCN10A; (+) strand; PAM type: YTN; PAM sequence: TTC
  source 1..20: mol_type = other DNA
aagcaattctcctgcctcag

SEQ ID NO: 70668 - DNA, 20 bp, synthetic construct
  misc_feature 1..20: note = Description of Artificial Sequence: Synthetic oligonucleotide
  misc_feature 1..20: note = Target: SCN10A; (+) strand; PAM type: YTN; PAM sequence: TTC
  source 1..20: mol_type = other DNA
tcctgcctcagtctcctgag

SEQ ID NO: 70669 - DNA, 20 bp, synthetic construct
  misc_feature 1..20: note = Description of Artificial Sequence: Synthetic oligonucleotide
  misc_feature 1..20: note = Target: SCN10A; (+) strand; PAM type: YTN; PAM sequence: CTC
  source 1..20: mol_type = other DNA
ctgcctcagtctcctgagta

SEQ ID NO: 70670 - DNA, 20 bp, synthetic construct
  misc_feature 1..20: note = Description of Artificial Sequence: Synthetic oligonucleotide
  misc_feature 1..20: note = Target: SCN10A; (+) strand; PAM type: YTN; PAM sequence: CTG
  source 1..20: mol_type = other DNA
cctcagtctcctgagtagct

SEQ ID NO: 70671 - DNA, 20 bp, synthetic construct
  misc_feature 1..20: note = Description of Artificial Sequence: Synthetic oligonucleotide
  misc_feature 1..20: note = Target: SCN10A; (+) strand; PAM type: YTN; PAM sequence: CTC
  source 1..20: mol_type = other DNA
agtctcctgagtagctggga

SEQ ID NO: 70672 - DNA, 20 bp, synthetic construct
  misc_feature 1..20: note = Description of Artificial Sequence: Synthetic oligonucleotide
  misc_feature 1..20: note = Target: SCN10A; (+) strand; PAM type: YTN; PAM sequence: CTC
  source 1..20: mol_type = other DNA
ctgagtagctgggattacag

SEQ ID NO: 70673 - DNA, 20 bp, synthetic construct
  misc_feature 1..20: note = Description of Artificial Sequence: Synthetic oligonucleotide
  misc_feature 1..20: note = Target: SCN10A; (+) strand; PAM type: YTN; PAM sequence: CTG
  source 1..20: mol_type = other DNA
agtagctgggattacaggca

SEQ ID NO: 70674 - DNA, 20 bp, synthetic construct
  misc_feature 1..20: note = Description of Artificial Sequence: Synthetic oligonucleotide
  misc_feature 1..20: note = Target: SCN10A; (+) strand; PAM type: YTN; PAM sequence: CTG
  source 1..20: mol_type = other DNA
ggattacaggcatgcaccac

SEQ ID NO: 70675 - DNA, 20 bp, synthetic construct
  misc_feature 1..20: note = Description of Artificial Sequence: Synthetic oligonucleotide
  misc_feature 1..20: note = Target: SCN10A; (+) strand; PAM type: YTN; PAM sequence: TTA
  source 1..20: mol_type = other DNA
caggcatgcaccaccacatc

SEQ ID NO: 70676 - DNA, 20 bp, synthetic construct
  misc_feature 1..20: note = Description of Artificial Sequence: Synthetic oligonucleotide
  misc_feature 1..20: note = Target: SCN10A; (+) strand; PAM type: YTN; PAM sequence: CTA
  source 1..20: mol_type = other DNA
gctaattttgtattttttag

SEQ ID NO: 70677 - DNA, 20 bp, synthetic construct
  misc_feature 1..20: note = Description of Artificial Sequence: Synthetic oligonucleotide
  misc_feature 1..20: note = Target: SCN10A; (+) strand; PAM type: YTN; PAM sequence: CTA
  source 1..20: mol_type = other DNA
attttgtattttttagtaga

SEQ ID NO: 70678 - DNA, 20 bp, synthetic construct
  misc_feature 1..20: note = Description of Artificial Sequence: Synthetic oligonucleotide
  misc_feature 1..20: note = Target: SCN10A; (+) strand; PAM type: YTN; PAM sequence: TTT
  source 1..20: mol_type = other DNA
tgtattttttagtagagacg

SEQ ID NO: 70679 - DNA, 20 bp, synthetic construct
  misc_feature 1..20: note = Description of Artificial Sequence: Synthetic oligonucleotide
  misc_feature 1..20: note = Target: SCN10A; (+) strand; PAM type: YTN; PAM sequence: TTT
  source 1..20: mol_type = other DNA
gtattttttagtagagacgg

SEQ ID NO: 70680 - DNA, 20 bp, synthetic construct
  misc_feature 1..20: note = Description of Artificial Sequence: Synthetic oligonucleotide
  misc_feature 1..20: note = Target: SCN10A; (+) strand; PAM type: YTN; PAM sequence: TTG
  source 1..20: mol_type = other DNA
tattttttagtagagacggg

SEQ ID NO: 70681 - DNA, 20 bp, synthetic construct
  misc_feature 1..20: note = Description of Artificial Sequence: Synthetic oligonucleotide
  misc_feature 1..20: note = Target: SCN10A; (+) strand; PAM type: YTN; PAM sequence: TTT
  source 1..20: mol_type = other DNA
tttagtagagacggggtttc

SEQ ID NO: 70682 - DNA, 20 bp, synthetic construct
  misc_feature 1..20: note = Description of Artificial Sequence: Synthetic oligonucleotide
  misc_feature 1..20: note = Target: SCN10A; (+) strand; PAM type: YTN; PAM sequence: TTT
  source 1..20: mol_type = other DNA
ttagtagagacggggtttct

SEQ ID NO: 70683 - DNA, 20 bp, synthetic construct
  misc_feature 1..20: note = Description of Artificial Sequence: Synthetic oligonucleotide
  misc_feature 1..20: note = Target: SCN10A; (+) strand; PAM type: YTN; PAM sequence: TTT
  source 1..20: mol_type = other DNA
tagtagagacggggtttctc

SEQ ID NO: 70684 - DNA, 20 bp, synthetic construct
  misc_feature 1..20: note = Description of Artificial Sequence: Synthetic oligonucleotide
  misc_feature 1..20: note = Target: SCN10A; (+) strand; PAM type: YTN; PAM sequence: TTT
  source 1..20: mol_type = other DNA
agtagagacggggtttctcc

SEQ ID NO: 70685 - DNA, 20 bp, synthetic construct
  misc_feature 1..20: note = Description of Artificial Sequence: Synthetic oligonucleotide
  misc_feature 1..20: note = Target: SCN10A; (+) strand; PAM type: YTN; PAM sequence: TTA
  source 1..20: mol_type = other DNA
gtagagacggggtttctcca

SEQ ID NO: 70686 - DNA, 20 bp, synthetic construct
  misc_feature 1..20: note = Description of Artificial Sequence: Synthetic oligonucleotide
  misc_feature 1..20: note = Target: SCN10A; (+) strand; PAM type: YTN; PAM sequence: TTT
  source 1..20: mol_type = other DNA
ctccatgttggcttcaggct

SEQ ID NO: 70687 - DNA, 20 bp, synthetic construct
  misc_feature 1..20: note = Description of Artificial Sequence: Synthetic oligonucleotide
  misc_feature 1..20: note = Target: SCN10A; (+) strand; PAM type: YTN; PAM sequence: TTC
  source 1..20: mol_type = other DNA
tccatgttggcttcaggctg

SEQ ID NO: 70688 - DNA, 20 bp, synthetic construct
  misc_feature 1..20: note = Description of Artificial Sequence: Synthetic oligonucleotide
  misc_feature 1..20: note = Target: SCN10A; (+) strand; PAM type: YTN; PAM sequence: CTC
  source 1..20: mol_type = other DNA
catgttggcttcaggctggt

SEQ ID NO: 70689 - DNA, 20 bp, synthetic construct
  misc_feature 1..20: note = Description of Artificial Sequence: Synthetic oligonucleotide
  misc_feature 1..20: note = Target: SCN10A; (+) strand; PAM type: YTN; PAM sequence: TTG
  source 1..20: mol_type = other DNA
gcttcaggctggtcttgaac

SEQ ID NO: 70690 - DNA, 20 bp, synthetic construct
  misc_feature 1..20: note = Description of Artificial Sequence: Synthetic oligonucleotide
  misc_feature 1..20: note = Target: SCN10A; (+) strand; PAM type: YTN; PAM sequence: CTT
  source 1..20: mol_type = other DNA
caggctggtcttgaacttct

SEQ ID NO: 70691 - DNA, 20 bp, synthetic construct
  misc_feature 1..20: note = Description of Artificial Sequence: Synthetic oligonucleotide
  misc_feature 1..20: note = Target: SCN10A; (+) strand; PAM type: YTN; PAM sequence: TTC
  source 1..20: mol_type = other DNA
aggctggtcttgaacttctg

SEQ ID NO: 70692 - DNA, 20 bp, synthetic construct
  misc_feature 1..20: note = Description of Artificial Sequence: Synthetic oligonucleotide
  misc_feature 1..20: note = Target: SCN10A; (+) strand; PAM type: YTN; PAM sequence: CTG
  source 1..20: mol_type = other DNA
gtcttgaacttctgacctca

SEQ ID NO: 70693 - DNA, 20 bp, synthetic construct
  misc_feature 1..20: note = Description of Artificial Sequence: Synthetic oligonucleotide
  misc_feature 1..20: note = Target: SCN10A; (+) strand; PAM type: YTN; PAM sequence: CTT
  source 1..20: mol_type = other DNA
gaacttctgacctcaggtga

SEQ ID NO: 70694 - DNA, 20 bp, synthetic construct
  misc_feature 1..20: note = Description of Artificial Sequence: Synthetic oligonucleotide
  misc_feature 1..20: note = Target: SCN10A; (+) strand; PAM type: YTN; PAM sequence: TTG
  source 1..20: mol_type = other DNA
aacttctgacctcaggtgat

SEQ ID NO: 70695 - DNA, 20 bp, synthetic construct
  misc_feature 1..20: note = Description of Artificial Sequence: Synthetic oligonucleotide
  misc_feature 1..20: note = Target: SCN10A; (+) strand; PAM type: YTN; PAM sequence: CTT
  source 1..20: mol_type = other DNA
ctgacctcaggtgatctgcc

SEQ ID NO: 70696 - DNA, 20 bp, synthetic construct
  misc_feature 1..20: note = Description of Artificial Sequence: Synthetic oligonucleotide
  misc_feature 1..20: note = Target: SCN10A; (+) strand; PAM type: YTN; PAM sequence: TTC
  source 1..20: mol_type = other DNA
tgacctcaggtgatctgccc

SEQ ID NO: 70697 - DNA, 20 bp, synthetic construct
  misc_feature 1..20: note = Description of Artificial Sequence: Synthetic oligonucleotide
  misc_feature 1..20: note = Target: SCN10A; (+) strand; PAM type: YTN; PAM sequence: CTG
  source 1..20: mol_type = other DNA
acctcaggtgatctgcccac

SEQ ID NO: 70698 - DNA, 20 bp, synthetic construct
  misc_feature 1..20: note = Description of Artificial Sequence: Synthetic oligonucleotide
  misc_feature 1..20: note = Target: SCN10A; (+) strand; PAM type: YTN; PAM sequence: CTC
  source 1..20: mol_type = other DNA
aggtgatctgcccaccttgg

SEQ ID NO: 70699 - DNA, 20 bp, synthetic construct
  misc_feature 1..20: note = Description of Artificial Sequence: Synthetic oligonucleotide
  misc_feature 1..20: note = Target: SCN10A; (+) strand; PAM type: YTN; PAM sequence: CTG
  source 1..20: mol_type = other DNA
cccaccttggcctcccaaag

SEQ ID NO: 70700 - DNA, 20 bp, synthetic construct
  misc_feature 1..20: note = Description of Artificial Sequence: Synthetic oligonucleotide
  misc_feature 1..20: note = Target: SCN10A; (+) strand; PAM type: YTN; PAM sequence: CTT
  source 1..20: mol_type = other DNA
ggcctcccaaagtgctgaga

SEQ ID NO: 70701 - DNA, 20 bp, synthetic construct
  misc_feature 1..20: note = Description of Artificial Sequence: Synthetic oligonucleotide
  misc_feature 1..20: note = Target: SCN10A; (+) strand; PAM type: YTN; PAM sequence: TTG
  source 1..20: mol_type = other DNA
gcctcccaaagtgctgagat

SEQ ID NO: 70702 - DNA, 20 bp, synthetic construct
  misc_feature 1..20: note = Description of Artificial Sequence: Synthetic oligonucleotide
  misc_feature 1..20: note = Target: SCN10A; (+) strand; PAM type: YTN; PAM sequence: CTC
  source 1..20: mol_type = other DNA
ccaaagtgctgagattacag

SEQ ID NO: 70703 - DNA, 20 bp, synthetic construct
  misc_feature 1..20: note = Description of Artificial Sequence: Synthetic oligonucleotide
  misc_feature 1..20: note = Target: SCN10A; (+) strand; PAM type: YTN; PAM sequence: CTG
  source 1..20: mol_type = other DNA
agattacaggcgtgagctac

SEQ ID NO: 70704 - DNA, 20 bp, synthetic construct
  misc_feature 1..20: note = Description of Artificial Sequence: Synthetic oligonucleotide
  misc_feature 1..20: note = Target: SCN10A; (+) strand; PAM type: YTN; PAM sequence: TTA
  source 1..20: mol_type = other DNA
caggcgtgagctactgtgcc

SEQ ID NO: 70705 - DNA, 20 bp, synthetic construct
  misc_feature 1..20: note = Description of Artificial Sequence: Synthetic oligonucleotide
  misc_feature 1..20: note = Target: SCN10A; (+) strand; PAM type: YTN; PAM sequence: CTA
  source 1..20: mol_type = other DNA
ctgtgcccagccctgaattc

SEQ ID NO: 70706 - DNA, 20 bp, synthetic construct
  misc_feature 1..20: note = Description of Artificial Sequence: Synthetic oligonucleotide
  misc_feature 1..20: note = Target: SCN10A; (+) strand; PAM type: YTN; PAM sequence: CTG
  source 1..20: mol_type = other DNA
tgcccagccctgaattcttt

SEQ ID NO: 70707 - DNA, 20 bp, synthetic construct
  misc_feature 1..20: note = Description of Artificial Sequence: Synthetic oligonucleotide
  misc_feature 1..20: note = Target: SCN10A; (+) strand; PAM type: YTN; PAM sequence: CTG
  source 1..20: mol_type = other DNA
aattctttatctggcaattc

SEQ ID NO: 70708 - DNA, 20 bp, synthetic construct
  misc_feature 1..20: note = Description of Artificial Sequence: Synthetic oligonucleotide
  misc_feature 1..20: note = Target: SCN10A; (+) strand; PAM type: YTN; PAM sequence: TTC
  source 1..20: mol_type = other DNA
tttatctggcaattcagaga

SEQ ID NO: 70709 - DNA, 20 bp, synthetic construct
  misc_feature 1..20: note = Description of Artificial Sequence: Synthetic oligonucleotide
  misc_feature 1..20: note = Target: SCN10A; (+) strand; PAM type: YTN; PAM sequence: CTT
  source 1..20: mol_type = other DNA
tatctggcaattcagagatt

SEQ ID NO: 70710 - DNA, 20 bp, synthetic construct
  misc_feature 1..20: note = Description of Artificial Sequence: Synthetic oligonucleotide
  misc_feature 1..20: note = Target: SCN10A; (+) strand; PAM type: YTN; PAM sequence: TTT
  source 1..20: mol_type = other DNA
atctggcaattcagagattt

SEQ ID NO: 70711 - DNA, 20 bp, synthetic construct
  misc_feature 1..20: note = Description of Artificial Sequence: Synthetic oligonucleotide
  misc_feature 1..20: note = Target: SCN10A; (+) strand; PAM type: YTN; PAM sequence: TTA
  source 1..20: mol_type = other DNA
tctggcaattcagagatttc

SEQ ID NO: 70712 - DNA, 20 bp, synthetic construct
  misc_feature 1..20: note = Description of Artificial Sequence: Synthetic oligonucleotide
  misc_feature 1..20: note = Target: SCN10A; (+) strand; PAM type: YTN; PAM sequence: CTG
  source 1..20: mol_type = other DNA
gcaattcagagatttcttct

SEQ ID NO: 70713 - DNA, 20 bp, synthetic construct
  misc_feature 1..20: note = Description of Artificial Sequence: Synthetic oligonucleotide
  misc_feature 1..20: note = Target: SCN10A; (+) strand; PAM type: YTN; PAM sequence: TTC
  source 1..20: mol_type = other DNA
agagatttcttcttagtttg

SEQ ID NO: 70714 - DNA, 20 bp, synthetic construct
  misc_feature 1..20: note = Description of Artificial Sequence: Synthetic oligonucleotide
  misc_feature 1..20: note = Target: SCN10A; (+) strand; PAM type: YTN; PAM sequence: TTT
  source 1..20: mol_type = other DNA
cttcttagtttggatccatt

SEQ ID NO: 70715 - DNA, 20 bp, synthetic construct
  misc_feature 1..20: note = Description of Artificial Sequence: Synthetic oligonucleotide
  misc_feature 1..20: note = Target: SCN10A; (+) strand; PAM type: YTN; PAM sequence: TTC
  source 1..20: mol_type = other DNA
ttcttagtttggatccattg

SEQ ID NO: 70716 - DNA, 20 bp, synthetic construct
  misc_feature 1..20: note = Description of Artificial Sequence: Synthetic oligonucleotide
  misc_feature 1..20: note = Target: SCN10A; (+) strand; PAM type: YTN; PAM sequence: CTT
  source 1..20: mol_type = other DNA
cttagtttggatccattgtt

SEQ ID NO: 70717 - DNA, 20 bp, synthetic construct
  misc_feature 1..20: note = Description of Artificial Sequence: Synthetic oligonucleotide
  misc_feature 1..20: note = Target: SCN10A; (+) strand; PAM type: YTN; PAM sequence: TTC
  source 1..20: mol_type = other DNA
ttagtttggatccattgttg

SEQ ID NO: 70718 - DNA, 20 bp, synthetic construct
  misc_feature 1..20: note = Description of Artificial Sequence: Synthetic oligonucleotide
  misc_feature 1..20: note = Target: SCN10A; (+) strand; PAM type: YTN; PAM sequence: CTT
  source 1..20: mol_type = other DNA
agtttggatccattgttggg

SEQ ID NO: 70719 - DNA, 20 bp, synthetic construct
  misc_feature 1..20: note = Description of Artificial Sequence: Synthetic oligonucleotide
  misc_feature 1..20: note = Target: SCN10A; (+) strand; PAM type: YTN; PAM sequence: TTA
  source 1..20: mol_type = other DNA
gtttggatccattgttgggg

SEQ ID NO: 70720 - DNA, 20 bp, synthetic construct
  misc_feature 1..20: note = Description of Artificial Sequence: Synthetic oligonucleotide
  misc_feature 1..20: note = Target: SCN10A; (+) strand; PAM type: YTN; PAM sequence: TTT
  source 1..20: mol_type = other DNA
ggatccattgttggggagct

SEQ ID NO: 70721 - DNA, 20 bp, synthetic construct
  misc_feature 1..20: note = Description of Artificial Sequence: Synthetic oligonucleotide
  misc_feature 1..20: note = Target: SCN10A; (+) strand; PAM type: YTN; PAM sequence: TTG
  source 1..20: mol_type = other DNA
gatccattgttggggagcta

SEQ ID NO: 70722 - DNA, 20 bp, synthetic construct
  misc_feature 1..20: note = Description of Artificial Sequence: Synthetic oligonucleotide
  misc_feature 1..20: note = Target: SCN10A; (+) strand; PAM type: YTN; PAM sequence: TTG
  source 1..20: mol_type = other DNA
ttggggagctagtttgatct

SEQ ID NO: 70723 - DNA, 20 bp, synthetic construct
  misc_feature 1..20: note = Description of Artificial Sequence: Synthetic oligonucleotide
  misc_feature 1..20: note = Target: SCN10A; (+) strand; PAM type: YTN; PAM sequence: TTG
  source 1..20: mol_type = other DNA
gggagctagtttgatctttt

SEQ ID NO: 70724 - DNA, 20 bp, synthetic construct
  misc_feature 1..20: note = Description of Artificial Sequence: Synthetic oligonucleotide
  misc_feature 1..20: note = Target: SCN10A; (+) strand; PAM type: YTN; PAM sequence: CTA
  source 1..20: mol_type = other DNA
gtttgatcttttgaggggtg

SEQ ID NO: 70725 - DNA, 20 bp, synthetic construct
  misc_feature 1..20: note = Description of Artificial Sequence: Synthetic oligonucleotide
  misc_feature 1..20: note = Target: SCN10A; (+) strand; PAM type: YTN; PAM sequence: TTT
  source 1..20: mol_type = other DNA
gatcttttgaggggtgttat

SEQ ID NO: 70726 - DNA, 20 bp, synthetic construct
  misc_feature 1..20: note = Description of Artificial Sequence: Synthetic oligonucleotide
  misc_feature 1..20: note = Target: SCN10A; (+) strand; PAM type: YTN; PAM sequence: TTG
  source 1..20: mol_type = other DNA
atcttttgaggggtgttatt

SEQ ID NO: 70727 - DNA, 20 bp, synthetic construct
  misc_feature 1..20: note = Description of Artificial Sequence: Synthetic oligonucleotide
  misc_feature 1..20: note = Target: SCN10A; (+) strand; PAM type: YTN; PAM sequence: CTT
  source 1..20: mol_type = other DNA
ttgaggggtgttattgaacc

SEQ ID NO: 70728 - DNA, 20 bp, synthetic construct
  misc_feature 1..20: note = Description of Artificial Sequence: Synthetic oligonucleotide
  misc_feature 1..20: note = Target: SCN10A; (+) strand; PAM type: YTN; PAM sequence: TTT
  source 1..20: mol_type = other DNA
tgaggggtgttattgaaccc

SEQ ID NO: 70729 - DNA, 20 bp, synthetic construct
  misc_feature 1..20: note = Description of Artificial Sequence: Synthetic oligonucleotide
  misc_feature 1..20: note = Target: SCN10A; (+) strand; PAM type: YTN; PAM sequence: TTT
  source 1..20: mol_type = other DNA
gaggggtgttattgaaccct

SEQ ID NO: 70730 - DNA, 20 bp, synthetic construct
  misc_feature 1..20: note = Description of Artificial Sequence: Synthetic oligonucleotide
  misc_feature 1..20: note = Target: SCN10A; (+) strand; PAM type: YTN; PAM sequence: TTG
  source 1..20: mol_type = other DNA
aggggtgttattgaaccctc

SEQ ID NO: 70731 - DNA, 20 bp, synthetic construct
  misc_feature 1..20: note = Description of Artificial Sequence: Synthetic oligonucleotide
  misc_feature 1..20: note = Target: SCN10A; (+) strand; PAM type: YTN; PAM sequence: TTA
  source 1..20: mol_type = other DNA
ttgaaccctcttttgtcata

SEQ ID NO: 70732 - DNA, 20 bp, synthetic construct
  misc_feature 1..20: note = Description of Artificial Sequence: Synthetic oligonucleotide
  misc_feature 1..20: note = Target: SCN10A; (+) strand; PAM type: YTN; PAM sequence: TTG
  source 1..20: mol_type = other DNA
aaccctcttttgtcatatta

SEQ ID NO: 70733 - DNA, 20 bp, synthetic construct
  misc_feature 1..20: note = Description of Artificial Sequence: Synthetic oligonucleotide
  misc_feature 1..20: note = Target: SCN10A; (+) strand; PAM type: YTN; PAM sequence: CTC
  source 1..20: mol_type = other DNA
ttttgtcatattaccagaat

SEQ ID NO: 70734 - DNA, 20 bp, synthetic construct
  misc_feature 1..20: note = Description of Artificial Sequence: Synthetic oligonucleotide
  misc_feature 1..20: note = Target: SCN10A; (+) strand; PAM type: YTN; PAM sequence: CTT
  source 1..20: mol_type = other DNA
ttgtcatattaccagaattg

SEQ ID NO: 70735 - DNA, 20 bp, synthetic construct
  misc_feature 1..20: note = Description of Artificial Sequence: Synthetic oligonucleotide
  misc_feature 1..20: note = Target: SCN10A; (+) strand; PAM type: YTN; PAM sequence: TTT
  source 1..20: mol_type = other DNA
tgtcatattaccagaattgc

SEQ ID NO: 70736 - DNA, 20 bp, synthetic construct
  misc_feature 1..20: note = Description of Artificial Sequence: Synthetic oligonucleotide
  misc_feature 1..20: note = Target: SCN10A; (+) strand; PAM type: YTN; PAM sequence: TTT
  source 1..20: mol_type = other DNA
gtcatattaccagaattgct

SEQ ID NO: 70737 - DNA, 20 bp, synthetic construct
  misc_feature 1..20: note = Description of Artificial Sequence: Synthetic oligonucleotide
  misc_feature 1..20: note = Target: SCN10A; (+) strand; PAM type: YTN; PAM sequence: TTG
  source 1..20: mol_type = other DNA
tcatattaccagaattgctt

SEQ ID NO: 70738 - DNA, 20 bp, synthetic construct
  misc_feature 1..20: note = Description of Artificial Sequence: Synthetic oligonucleotide
  misc_feature 1..20: note = Target: SCN10A; (+) strand; PAM type: YTN; PAM sequence: TTA
  source 1..20: mol_type = other DNA
ccagaattgcttttctggtt

SEQ ID NO: 70739 - DNA, 20 bp, synthetic construct
  misc_feature 1..20: note = Description of Artificial Sequence: Synthetic oligonucleotide
  misc_feature 1..20: note = Target: SCN10A; (+) strand; PAM type: YTN; PAM sequence: TTG
  source 1..20: mol_type = other DNA
cttttctggttccttctcat

SEQ ID NO: 70740 - DNA, 20 bp, synthetic construct
  misc_feature 1..20: note = Description of Artificial Sequence: Synthetic oligonucleotide
  misc_feature 1..20: note = Target: SCN10A; (+) strand; PAM type: YTN; PAM sequence: CTT
  source 1..20: mol_type = other DNA
ttctggttccttctcatttg

SEQ ID NO: 70741 - DNA, 20 bp, synthetic construct
  misc_feature 1..20: note = Description of Artificial Sequence: Synthetic oligonucleotide
  misc_feature 1..20: note = Target: SCN10A; (+) strand; PAM type: YTN; PAM sequence: TTT
  source 1..20: mol_type = other DNA
tctggttccttctcatttga

SEQ ID NO: 70742 - DNA, 20 bp, synthetic construct
  misc_feature 1..20: note = Description of Artificial Sequence: Synthetic oligonucleotide
  misc_feature 1..20: note = Target: SCN10A; (+) strand; PAM type: YTN; PAM sequence: TTT
  source 1..20: mol_type = other DNA
ctggttccttctcatttgag

SEQ ID NO: 70743 - DNA, 20 bp, synthetic construct
  misc_feature 1..20: note = Description of Artificial Sequence: Synthetic oligonucleotide
  misc_feature 1..20: note = Target: SCN10A; (+) strand; PAM type: YTN; PAM sequence: TTC
  source 1..20: mol_type = other DNA
tggttccttctcatttgagt

SEQ ID NO: 70744 - DNA, 20 bp, synthetic construct
  misc_feature 1..20: note = Description of Artificial Sequence: Synthetic oligonucleotide
  misc_feature 1..20: note = Target: SCN10A; (+) strand; PAM type: YTN; PAM sequence: CTG
  source 1..20: mol_type = other DNA
gttccttctcatttgagtag

SEQ ID NO: 70745 - DNA, 20 bp, synthetic construct
  misc_feature 1..20: note = Description of Artificial Sequence: Synthetic oligonucleotide
  misc_feature 1..20: note = Target: SCN10A; (+) strand; PAM type: YTN; PAM sequence: TTC
  source 1..20: mol_type = other DNA
cttctcatttgagtagacta

SEQ ID NO: 70746 - DNA, 20 bp, synthetic construct
  misc_feature 1..20: note = Description of Artificial Sequence: Synthetic oligonucleotide
  misc_feature 1..20: note = Target: SCN10A; (+) strand; PAM type: YTN; PAM sequence: CTT
  source 1..20: mol_type = other DNA
ctcatttgagtagactattt

SEQ ID NO: 70747 - DNA, 20 bp, synthetic construct
  misc_feature 1..20: note = Description of Artificial Sequence: Synthetic oligonucleotide
  misc_feature 1..20: note = Target: SCN10A; (+) strand; PAM type: YTN; PAM sequence: TTC
  source 1..20: mol_type = other DNA
tcatttgagtagactatttc

SEQ ID NO: 70748 - DNA, 20 bp, synthetic construct
  misc_feature 1..20: note = Description of Artificial Sequence: Synthetic oligonucleotide
  misc_feature 1..20: note = Target: SCN10A; (+) strand; PAM type: YTN; PAM sequence: CTC
  source 1..20: mol_type = other DNA
atttgagtagactatttcag

SEQ ID NO: 70749 - DNA, 20 bp, synthetic construct
  misc_feature 1..20: note = Description of Artificial Sequence: Synthetic oligonucleotide
  misc_feature 1..20: note = Target: SCN10A; (+) strand; PAM type: YTN; PAM sequence: TTT
  source 1..20: mol_type = other DNA
gagtagactatttcagagaa

SEQ ID NO: 70750 - DNA, 20 bp, synthetic construct
  misc_feature 1..20: note = Description of Artificial Sequence: Synthetic oligonucleotide
  misc_feature 1..20: note = Target: SCN10A; (+) strand; PAM type: YTN; PAM sequence: TTG
  source 1..20: mol_type = other DNA
agtagactatttcagagaaa

SEQ ID NO: 70751 - DNA, 20 bp, synthetic construct
  misc_feature 1..20: note = Description of Artificial Sequence: Synthetic oligonucleotide
  misc_feature 1..20: note = Target: SCN10A; (+) strand; PAM type: YTN; PAM sequence: CTA
  source 1..20: mol_type = other DNA
tttcagagaaaagatctgga

SEQ ID NO: 70752 - DNA, 20 bp, synthetic construct
  misc_feature 1..20: note = Description of Artificial Sequence: Synthetic oligonucleotide
  misc_feature 1..20: note = Target: SCN10A; (+) strand; PAM type: YTN; PAM sequence: TTT
  source 1..20: mol_type = other DNA
cagagaaaagatctggaact

SEQ ID NO: 70753 - DNA, 20 bp, synthetic construct
  misc_feature 1..20: note = Description of Artificial Sequence: Synthetic oligonucleotide
  misc_feature 1..20: note = Target: SCN10A; (+) strand; PAM type: YTN; PAM sequence: TTC
  source 1..20: mol_type = other DNA
agagaaaagatctggaactg

SEQ ID NO: 70754 - DNA, 20 bp, synthetic construct
  misc_feature 1..20: note = Description of Artificial Sequence: Synthetic oligonucleotide
  misc_feature 1..20: note = Target: SCN10A; (+) strand; PAM type: YTN; PAM sequence: CTG
  source 1..20: mol_type = other DNA
gaactgaatggctgttgtgc

SEQ ID NO: 70755 - DNA, 20 bp, synthetic construct
  misc_feature 1..20: note = Description of Artificial Sequence: Synthetic oligonucleotide
  misc_feature 1..20: note = Target: SCN10A; (+) strand; PAM type: YTN; PAM sequence: CTG
  source 1..20: mol_type = other DNA
aatggctgttgtgcagattc

SEQ ID NO: 70756 - DNA, 20 bp, synthetic construct
  misc_feature 1..20: note = Description of Artificial Sequence: Synthetic oligonucleotide
  misc_feature 1..20: note = Target: SCN10A; (+) strand; PAM type: YTN; PAM sequence: CTG
  source 1..20: mol_type = other DNA
ttgtgcagattcttttgttt

SEQ ID NO: 70757 - DNA, 20 bp, synthetic construct
  misc_feature 1..20: note = Description of Artificial Sequence: Synthetic oligonucleotide
  misc_feature 1..20: note = Target: SCN10A; (+) strand; PAM type: YTN; PAM sequence: TTG
  source 1..20: mol_type = other DNA
tgcagattcttttgtttcat

SEQ ID NO: 70758 - DNA, 20 bp, synthetic construct
  misc_feature 1..20: note = Description of Artificial Sequence: Synthetic oligonucleotide
  misc_feature 1..20: note = Target: SCN10A; (+) strand; PAM type: YTN; PAM sequence: TTC
  source 1..20: mol_type = other DNA
ttttgtttcatgggtgatct

SEQ ID NO: 70759 - DNA, 20 bp, synthetic construct
  misc_feature 1..20: note = Description of Artificial Sequence: Synthetic oligonucleotide
  misc_feature 1..20: note = Target: SCN10A; (+) strand; PAM type: YTN; PAM sequence: CTT
  source 1..20: mol_type = other DNA
ttgtttcatgggtgatctct

SEQ ID NO: 70760 - DNA, 20 bp, synthetic construct
  misc_feature 1..20: note = Description of Artificial Sequence: Synthetic oligonucleotide
  misc_feature 1..20: note = Target: SCN10A; (+) strand; PAM type: YTN; PAM sequence: TTT
  source 1..20: mol_type = other DNA
tgtttcatgggtgatctctt

SEQ ID NO: 70761 - DNA, 20 bp, synthetic construct
  misc_feature 1..20: note = Description of Artificial Sequence: Synthetic oligonucleotide
  misc_feature 1..20: note = Target: SCN10A; (+) strand; PAM type: YTN; PAM sequence: TTT
  source 1..20: mol_type = other DNA
gtttcatgggtgatctcttg

SEQ ID NO: 70762 - DNA, 20 bp, synthetic construct
  misc_feature 1..20: note = Description of Artificial Sequence: Synthetic oligonucleotide
  misc_feature 1..20: note = Target: SCN10A; (+) strand; PAM type: YTN; PAM sequence: TTG
  source 1..20: mol_type = other DNA
tttcatgggtgatctcttga

SEQ ID NO: 70763 - DNA, 20 bp, synthetic construct
  misc_feature 1..20: note = Description of Artificial Sequence: Synthetic oligonucleotide
  misc_feature 1..20: note = Target: SCN10A; (+) strand; PAM type: YTN; PAM sequence: TTT
  source 1..20: mol_type = other DNA
catgggtgatctcttgatgt

SEQ ID NO: 70764 - DNA, 20 bp, synthetic construct
  misc_feature 1..20: note = Description of Artificial Sequence: Synthetic oligonucleotide
  misc_feature 1..20: note = Target: SCN10A; (+) strand; PAM type: YTN; PAM sequence: TTC
  source 1..20: mol_type = other DNA
atgggtgatctcttgatgtg

SEQ ID NO: 70765 - DNA, 20 bp, synthetic construct
  misc_feature 1..20: note = Description of Artificial Sequence: Synthetic oligonucleotide
  misc_feature 1..20: note = Target: SCN10A; (+) strand; PAM type: YTN; PAM sequence: CTC
  source 1..20: mol_type = other DNA
ttgatgtggtgctctcccca

SEQ ID NO: 70766 - DNA, 20 bp, synthetic construct
  misc_feature 1..20: note = Description of Artificial Sequence: Synthetic oligonucleotide
  misc_feature 1..20: note = Target: SCN10A; (+) strand; PAM type: YTN; PAM sequence: CTT
  source 1..20: mol_type = other DNA
gatgtggtgctctccccaat

SEQ ID NO: 70767 - DNA, 20 bp, synthetic construct
  misc_feature 1..20: note = Description of Artificial Sequence: Synthetic oligonucleotide
  misc_feature 1..20: note = Target: SCN10A; (+) strand; PAM type: YTN; PAM sequence: TTG
  source 1..20: mol_type = other DNA
atgtggtgctctccccaatc

SEQ ID NO: 70768 - DNA, 20 bp, synthetic construct
  misc_feature 1..20: note = Description of Artificial Sequence: Synthetic oligonucleotide
  misc_feature 1..20: note = Target: SCN10A; (+) strand; PAM type: YTN; PAM sequence: CTC
  source 1..20: mol_type = other DNA
tccccaatcccctggggatg

SEQ ID NO: 70769 - DNA, 20 bp, synthetic construct
  misc_feature 1..20: note = Description of Artificial Sequence: Synthetic oligonucleotide
  misc_feature 1..20: note = Target: SCN10A; (+) strand; PAM type: YTN; PAM sequence: CTC
  source 1..20: mol_type = other DNA
cccaatcccctggggatggg

SEQ ID NO: 70770 - DNA, 20 bp, synthetic construct
  misc_feature 1..20: note = Description of Artificial Sequence: Synthetic oligonucleotide
  misc_feature 1..20: note = Target: SCN10A; (+) strand; PAM type: YTN; PAM sequence: CTG
  source 1..20: mol_type = other DNA
gggatggggcttcctgagag

SEQ ID NO: 70771 - DNA, 20 bp, synthetic construct
  misc_feature 1..20: note = Description of Artificial Sequence: Synthetic oligonucleotide
  misc_feature 1..20: note = Target: SCN10A; (+) strand; PAM type: YTN; PAM sequence: CTT
  source 1..20: mol_type = other DNA
cctgagagctggactgcagt

SEQ ID NO: 70772 - DNA, 20 bp, synthetic construct
  misc_feature 1..20: note = Description of Artificial Sequence: Synthetic oligonucleotide
  misc_feature 1..20: note = Target: SCN10A; (+) strand; PAM type: YTN; PAM sequence: TTC
  source 1..20: mol_type = other DNA
ctgagagctggactgcagtg

SEQ ID NO: 70773 - DNA, 20 bp, synthetic construct
  misc_feature 1..20: note = Description of Artificial Sequence: Synthetic oligonucleotide
  misc_feature 1..20: note = Target: SCN10A; (+) strand; PAM type: YTN; PAM sequence: CTG
  source 1..20: mol_type = other DNA
agagctggactgcagtgatc

SEQ ID NO: 70774 - DNA, 20 bp, synthetic construct
  misc_feature 1..20: note = Description of Artificial Sequence: Synthetic oligonucleotide
  misc_feature 1..20: note = Target: SCN10A; (+) strand; PAM type: YTN; PAM sequence: CTG
  source 1..20: mol_type = other DNA
gactgcagtgatcgttattg

SEQ ID NO: 70775 - DNA, 20 bp, synthetic construct
  misc_feature 1..20: note = Description of Artificial Sequence: Synthetic oligonucleotide
  misc_feature 1..20: note = Target: SCN10A; (+) strand; PAM type: YTN; PAM sequence: CTG
  source 1..20: mol_type = other DNA
cagtgatcgttattgttctt

SEQ ID NO: 70776 - DNA, 20 bp, synthetic construct
  misc_feature 1..20: note = Description of Artificial Sequence: Synthetic oligonucleotide
  misc_feature 1..20: note = Target: SCN10A; (+) strand; PAM type: YTN; PAM sequence: TTA
  source 1..20: mol_type = other DNA
ttgttcttctgggcctagcc

SEQ ID NO: 70777 - DNA, 20 bp, synthetic construct
  misc_feature 1..20: note = Description of Artificial Sequence: Synthetic oligonucleotide
  misc_feature 1..20: note = Target: SCN10A; (+) strand; PAM type: YTN; PAM sequence: TTG
  source 1..20: mol_type = other DNA
ttcttctgggcctagccaca

SEQ ID NO: 70778 - DNA, 20 bp, synthetic construct
  misc_feature 1..20: note = Description of Artificial Sequence: Synthetic oligonucleotide
  misc_feature 1..20: note = Target: SCN10A; (+) strand; PAM type: YTN; PAM sequence: TTC
  source 1..20: mol_type = other DNA
ttctgggcctagccacacag

SEQ ID NO: 70779 - DNA, 20 bp, synthetic construct
  misc_feature 1..20: note = Description of Artificial Sequence: Synthetic oligonucleotide
  misc_feature 1..20: note = Target: SCN10A; (+) strand; PAM type: YTN; PAM sequence: CTT
  source 1..20: mol_type = other DNA
ctgggcctagccacacagag

SEQ ID NO: 70780 - DNA, 20 bp, synthetic construct
  misc_feature 1..20: note = Description of Artificial Sequence: Synthetic oligonucleotide
  misc_feature 1..20: note = Target: SCN10A; (+) strand; PAM type: YTN; PAM sequence: TTC
  source 1..20: mol_type = other DNA
tgggcctagccacacagagg

SEQ ID NO: 70781 - DNA, 20 bp, synthetic construct
  misc_feature 1..20: note = Description of Artificial Sequence: Synthetic oligonucleotide
  misc_feature 1..20: note = Target: SCN10A; (+) strand; PAM type: YTN; PAM sequence: CTG
  source 1..20: mol_type = other DNA
ggcctagccacacagagggg

SEQ ID NO: 70782 - DNA, 20 bp, synthetic construct
  misc_feature 1..20: note = Description of Artificial Sequence: Synthetic oligonucleotide
  misc_feature 1..20: note = Target: SCN10A; (+) strand; PAM type: YTN; PAM sequence: CTA
  source 1..20: mol_type = other DNA
gccacacagaggggctacca

SEQ ID NO: 70783 - DNA, 20 bp, synthetic construct
  misc_feature 1..20: note = Description of Artificial Sequence: Synthetic oligonucleotide
  misc_feature 1..20: note = Target: SCN10A; (+) strand; PAM type: YTN; PAM sequence: CTA
  source 1..20: mol_type = other DNA
ccaggctctggggtagtact

SEQ ID NO: 70784 - DNA, 20 bp, synthetic construct
  misc_feature 1..20: note = Description of Artificial Sequence: Synthetic oligonucleotide
  misc_feature 1..20: note = Target: SCN10A; (+) strand; PAM type: YTN; PAM sequence: CTC
  source 1..20: mol_type = other DNA
tggggtagtactgggaaatg

SEQ ID NO: 70785 - DNA, 20 bp, synthetic construct
  misc_feature 1..20: note = Description of Artificial Sequence: Synthetic oligonucleotide
  misc_feature 1..20: note = Target: SCN10A; (+) strand; PAM type: YTN; PAM sequence: CTG
  source 1..20: mol_type = other DNA
gggtagtactgggaaatgcc

SEQ ID NO: 70786 - DNA, 20 bp, synthetic construct
  misc_feature 1..20: note = Description of Artificial Sequence: Synthetic oligonucleotide
  misc_feature 1..20: note = Target: SCN10A; (+) strand; PAM type: YTN; PAM sequence: CTG
  source 1..20: mol_type = other DNA
ggaaatgcctgcaagagtcc

SEQ ID NO: 70787 - DNA, 20 bp, synthetic construct
  misc_feature 1..20: note = Description of Artificial Sequence: Synthetic oligonucleotide
  misc_feature 1..20: note = Target: SCN10A; (+) strand; PAM type: YTN; PAM sequence: CTG
  source 1..20: mol_type = other DNA
caagagtcctgtgatgtgat

SEQ ID NO: 70788 - DNA, 20 bp, synthetic construct
  misc_feature 1..20: note = Description of Artificial Sequence: Synthetic oligonucleotide
  misc_feature 1..20: note = Target: SCN10A; (+) strand; PAM type: YTN; PAM sequence: CTG
  source 1..20: mol_type = other DNA
tgatgtgattgatcttgaag

SEQ ID NO: 70789 - DNA, 20 bp, synthetic construct
  misc_feature 1..20: note = Description of Artificial Sequence: Synthetic oligonucleotide
  misc_feature 1..20: note = Target: SCN10A; (+) strand; PAM type: YTN; PAM sequence: TTG
  source 1..20: mol_type = other DNA
atcttgaagtctcccagcca

SEQ ID NO: 70790 - DNA, 20 bp, synthetic construct
  misc_feature 1..20: note = Description of Artificial Sequence: Synthetic oligonucleotide
  misc_feature 1..20: note = Target: SCN10A; (+) strand; PAM type: YTN; PAM sequence: CTT
  source 1..20: mol_type = other DNA
gaagtctcccagccatggat

SEQ ID NO: 70791 - DNA, 20 bp, synthetic construct
  misc_feature 1..20: note = Description of Artificial Sequence: Synthetic oligonucleotide
  misc_feature 1..20: note = Target: SCN10A; (+) strand; PAM type: YTN; PAM sequence: TTG
  source 1..20: mol_type = other DNA
aagtctcccagccatggata

SEQ ID NO: 70792 - DNA, 20 bp, synthetic construct
  misc_feature 1..20: note = Description of Artificial Sequence: Synthetic oligonucleotide
  misc_feature 1..20: note = Target: SCN10A; (+) strand; PAM type: YTN; PAM sequence: CTC
  source 1..20: mol_type = other DNA
ccagccatggatatcagcat

SEQ ID NO: 70793 - DNA, 20 bp, synthetic construct
  misc_feature 1..20: note = Description of Artificial Sequence: Synthetic oligonucleotide
  misc_feature 1..20: note = Target: SCN10A; (+) strand; PAM type: YTN; PAM sequence: CTG
  source 1..20: mol_type = other DNA
ttctggtgaaggtggcagag

SEQ ID NO: 70794 - DNA, 20 bp, synthetic construct
  misc_feature 1..20: note = Description of Artificial Sequence: Synthetic oligonucleotide
  misc_feature 1..20: note = Target: SCN10A; (+) strand; PAM type: YTN; PAM sequence: TTC
  source 1..20: mol_type = other DNA
tggtgaaggtggcagaggaa

SEQ ID NO: 70795 - DNA, 20 bp, synthetic construct
  misc_feature 1..20: note = Description of Artificial Sequence: Synthetic oligonucleotide
  misc_feature 1..20: note = Target: SCN10A; (+) strand; PAM type: YTN; PAM sequence: CTG
  source 1..20: mol_type = other DNA
gtgaaggtggcagaggaatg

SEQ ID NO: 70796 - DNA, 20 bp, synthetic construct
  misc_feature 1..20: note = Description of Artificial Sequence: Synthetic oligonucleotide
  misc_feature 1..20: note = Target: SCN10A; (+) strand; PAM type: YTN; PAM sequence: CTG
  source 1..20: mol_type = other DNA
tgagagtcctaggctgtaga

SEQ ID NO: 70797 - DNA, 20 bp, synthetic construct
  misc_feature 1..20: note = Description of Artificial Sequence: Synthetic oligonucleotide
  misc_feature 1..20: note = Target: SCN10A; (+) strand; PAM type: YTN; PAM sequence: CTA
  source 1..20: mol_type = other DNA
ggctgtagatagatttagtg

SEQ ID NO: 70798 - DNA, 20 bp, synthetic construct
  misc_feature 1..20: note = Description of Artificial Sequence: Synthetic oligonucleotide
  misc_feature 1..20: note = Target: SCN10A; (+) strand; PAM type: YTN; PAM sequence: CTG
  source 1..20: mol_type = other DNA
tagatagatttagtgtgctg

SEQ ID NO: 70799 - DNA, 20 bp, synthetic construct
  misc_feature 1..20: note = Description of Artificial Sequence: Synthetic oligonucleotide
  misc_feature 1..20: note = Target: SCN10A; (+) strand; PAM type: YTN; PAM sequence: TTT
  source 1..20: mol_type = other DNA
agtgtgctggctttcttgaa

SEQ ID NO: 70800 - DNA, 20 bp, synthetic construct
  misc_feature 1..20: note = Description of Artificial Sequence: Synthetic oligonucleotide
  misc_feature 1..20: note = Target: SCN10A; (+) strand; PAM type: YTN; PAM sequence: TTA
  source 1..20: mol_type = other DNA
gtgtgctggctttcttgaat

SEQ ID NO: 70801 - DNA, 20 bp, synthetic construct
  misc_feature 1..20: note = Description of Artificial Sequence: Synthetic oligonucleotide
  misc_feature 1..20: note = Target: SCN10A; (+) strand; PAM type: YTN; PAM sequence: CTG
  source 1..20: mol_type = other DNA
gctttcttgaatgctagtta

SEQ ID NO: 70802 - DNA, 20 bp, synthetic construct
  misc_feature 1..20: note = Description of Artificial Sequence: Synthetic oligonucleotide
  misc_feature 1..20: note = Target: SCN10A; (+) strand; PAM type: YTN; PAM sequence: CTT
  source 1..20: mol_type = other DNA
tcttgaatgctagttatgtt

SEQ ID NO: 70803 - DNA, 20 bp, synthetic construct
  misc_feature 1..20: note = Description of Artificial Sequence: Synthetic oligonucleotide
  misc_feature 1..20: note = Target: SCN10A; (+) strand; PAM type: YTN; PAM sequence: TTT
  source 1..20: mol_type = other DNA
cttgaatgctagttatgtta

SEQ ID NO: 70804 - DNA, 20 bp, synthetic construct
  misc_feature 1..20: note = Description of Artificial Sequence: Synthetic oligonucleotide
  misc_feature 1..20: note = Target: SCN10A; (+) strand; PAM type: YTN; PAM sequence: TTC
  source 1..20: mol_type = other DNA
ttgaatgctagttatgttag

SEQ ID NO: 70805 - DNA, 20 bp, synthetic construct
  misc_feature 1..20: note = Description of Artificial Sequence: Synthetic oligonucleotide
  misc_feature 1..20: note = Target: SCN10A; (+) strand; PAM type: YTN; PAM sequence: CTT
  source 1..20: mol_type = other DNA
gaatgctagttatgttagca

SEQ ID NO: 70806 - DNA, 20 bp, synthetic construct
  misc_feature 1..20: note = Description of Artificial Sequence: Synthetic oligonucleotide
  misc_feature 1..20: note = Target: SCN10A; (+) strand; PAM type: YTN; PAM sequence: TTG
  source 1..20: mol_type = other DNA
aatgctagttatgttagcag

SEQ ID NO: 70807 - DNA, 20 bp, synthetic construct
  misc_feature 1..20: note = Description of Artificial Sequence: Synthetic oligonucleotide
  misc_feature 1..20: note = Target: SCN10A; (+) strand; PAM type: YTN; PAM sequence: CTA
  source 1..20: mol_type = other DNA
gttatgttagcagtgaagtt

SEQ ID NO: 70808 - DNA, 20 bp, synthetic construct
  misc_feature 1..20: note = Description of Artificial Sequence: Synthetic oligonucleotide
  misc_feature 1..20: note = Target: SCN10A; (+) strand; PAM type: YTN; PAM sequence: TTA
  source 1..20: mol_type = other DNA
tgttagcagtgaagttgtca

SEQ ID NO: 70809 - DNA, 20 bp, synthetic construct
  misc_feature 1..20: note = Description of Artificial Sequence: Synthetic oligonucleotide
  misc_feature 1..20: note = Target: SCN10A; (+) strand; PAM type: YTN; PAM sequence: TTA
  source 1..20: mol_type = other DNA
gcagtgaagttgtcatatgg

SEQ ID NO: 70810 - DNA, 20 bp, synthetic construct
  misc_feature 1..20: note = Description of Artificial Sequence: Synthetic oligonucleotide
  misc_feature 1..20: note = Target: SCN10A; (+) strand; PAM type: YTN; PAM sequence: TTG
  source 1..20: mol_type = other DNA
tcatatggacagactcagga

SEQ ID NO: 70811 - DNA, 20 bp, synthetic construct
  misc_feature 1..20: note = Description of Artificial Sequence: Synthetic oligonucleotide
  misc_feature 1..20: note = Target: SCN10A; (+) strand; PAM type: YTN; PAM sequence: CTC
  source 1..20: mol_type = other DNA
aggacgtctggttagccagg

SEQ ID NO: 70812 - DNA, 20 bp, synthetic construct
  misc_feature 1..20: note = Description of Artificial Sequence: Synthetic oligonucleotide
  misc_feature 1..20: note = Target: SCN10A; (+) strand; PAM type: YTN; PAM sequence: CTG
  source 1..20: mol_type = other DNA
gttagccaggatgttgcagg

SEQ ID NO: 70813 - DNA, 20 bp, synthetic construct
  misc_feature 1..20: note = Description of Artificial Sequence: Synthetic oligonucleotide
  misc_feature 1..20: note = Target: SCN10A; (+) strand; PAM type: YTN; PAM sequence: TTA
  source 1..20: mol_type = other DNA
gccaggatgttgcaggcagt

SEQ ID NO: 70814 - DNA, 20 bp, synthetic construct
  misc_feature 1..20: note = Description of Artificial Sequence: Synthetic oligonucleotide
  misc_feature 1..20: note = Target: SCN10A; (+) strand; PAM type: YTN; PAM sequence: TTG
  source 1..20: mol_type = other DNA
caggcagtgcaactggttgt

SEQ ID NO: 70815 - DNA, 20 bp, synthetic construct
  misc_feature 1..20: note = Description of Artificial Sequence: Synthetic oligonucleotide
  misc_feature 1..20: note = Target: SCN10A; (+) strand; PAM type: YTN; PAM sequence: CTG
  source 1..20: mol_type = other DNA
gttgttgttttctttttcct

SEQ ID NO: 70816 - DNA, 20 bp, synthetic construct
  misc_feature 1..20: note = Description of Artificial Sequence: Synthetic oligonucleotide
  misc_feature 1..20: note = Target: SCN10A; (+) strand; PAM type: YTN; PAM sequence: TTG
  source 1..20: mol_type = other DNA
ttgttttctttttcctggga

SEQ ID NO: 70817 - DNA, 20 bp, synthetic construct
  misc_feature 1..20: note = Description of Artificial Sequence: Synthetic oligonucleotide
  misc_feature 1..20: note = Target: SCN10A; (+) strand; PAM type: YTN; PAM sequence: TTG
  source 1..20: mol_type = other DNA
ttttctttttcctgggatca

SEQ ID NO: 70818 - DNA, 20 bp, synthetic construct
  misc_feature 1..20: note = Description of Artificial Sequence: Synthetic oligonucleotide
  misc_feature 1..20: note = Target: SCN10A; (+) strand; PAM type: YTN; PAM sequence: TTT
  source 1..20: mol_type = other DNA
tctttttcctgggatcaaag

SEQ ID NO: 70819 - DNA, 20 bp, synthetic construct
  misc_feature 1..20: note = Description of Artificial Sequence: Synthetic oligonucleotide
  misc_feature 1..20: note = Target: SCN10A; (+) strand; PAM type: YTN; PAM sequence: TTT
  source 1..20: mol_type = other DNA
ctttttcctgggatcaaagt

SEQ ID NO: 70820 - DNA, 20 bp, synthetic construct
  misc_feature 1..20: note = Description of Artificial Sequence: Synthetic oligonucleotide
  misc_feature 1..20: note = Target: SCN10A; (+) strand; PAM type: YTN; PAM sequence: TTC
  source 1..20: mol_type = other DNA
tttttcctgggatcaaagtt

SEQ ID NO: 70821 - DNA, 20 bp, synthetic construct
  misc_feature 1..20: note = Description of Artificial Sequence: Synthetic oligonucleotide
  misc_feature 1..20: note = Target: SCN10A; (+) strand; PAM type: YTN; PAM sequence: CTT
  source 1..20: mol_type = other DNA
tttcctgggatcaaagttat

SEQ ID NO: 70822 - DNA, 20 bp, synthetic construct
  misc_feature 1..20: note = Description of Artificial Sequence: Synthetic oligonucleotide
  misc_feature 1..20: note = Target: SCN10A; (+) strand; PAM type: YTN; PAM sequence: TTT
  source 1..20: mol_type = other DNA
ttcctgggatcaaagttatt

SEQ ID NO: 70823 - DNA, 20 bp, synthetic construct
  misc_feature 1..20: note = Description of Artificial Sequence: Synthetic oligonucleotide
  misc_feature 1..20: note = Target: SCN10A; (+) strand; PAM type: YTN; PAM sequence: TTT
  source 1..20: mol_type = other DNA
tcctgggatcaaagttattc

SEQ ID NO: 70824 - DNA, 20 bp, synthetic construct
  misc_feature 1..20: note = Description of Artificial Sequence: Synthetic oligonucleotide
  misc_feature 1..20: note = Target: SCN10A; (+) strand; PAM type: YTN; PAM sequence: TTT
  source 1..20: mol_type = other DNA
cctgggatcaaagttattct

SEQ ID NO: 70825 - DNA, 20 bp, synthetic construct
  misc_feature 1..20: note = Description of Artificial Sequence: Synthetic oligonucleotide
  misc_feature 1..20: note = Target: SCN10A; (+) strand; PAM type: YTN; PAM sequence: TTC
  source 1..20: mol_type = other DNA
ctgggatcaaagttattctg

SEQ ID NO: 70826 - DNA, 20 bp, synthetic construct
  misc_feature 1..20: note = Description of Artificial Sequence: Synthetic oligonucleotide
  misc_feature 1..20: note = Target: SCN10A; (+) strand; PAM type: YTN; PAM sequence: CTG
  source 1..20: mol_type = other DNA
ggatcaaagttattctgtca

SEQ ID NO: 70827 - DNA, 20 bp, synthetic construct
  misc_feature 1..20: note = Description of Artificial Sequence: Synthetic oligonucleotide
  misc_feature 1..20: note = Target: SCN10A; (+) strand; PAM type: YTN; PAM sequence: TTA
  source 1..20: mol_type = other DNA
ttctgtcatgagttgcttta

SEQ ID NO: 70828 - DNA, 20 bp, synthetic construct
  misc_feature 1..20: note = Description of Artificial Sequence: Synthetic oligonucleotide
  misc_feature 1..20: note = Target: SCN10A; (+) strand; PAM type: YTN; PAM sequence: TTC
  source 1..20: mol_type = other DNA
tgtcatgagttgctttaatg

SEQ ID NO: 70829 - DNA, 20 bp, synthetic construct
  misc_feature 1..20: note = Description of Artificial Sequence: Synthetic oligonucleotide
  misc_feature 1..20: note = Target: SCN10A; (+) strand; PAM type: YTN; PAM sequence: CTG
  source 1..20: mol_type = other DNA
tcatgagttgctttaatggc

SEQ ID NO: 70830 - DNA, 20 bp, synthetic construct
  misc_feature 1..20: note = Description of Artificial Sequence: Synthetic oligonucleotide
  misc_feature 1..20: note = Target: SCN10A; (+) strand; PAM type: YTN; PAM sequence: TTG
  source 1..20: mol_type = other DNA
ctttaatggcctgagctgtt

SEQ ID NO: 70831 - DNA, 20 bp, synthetic construct
  misc_feature 1..20: note = Description of Artificial Sequence: Synthetic oligonucleotide
  misc_feature 1..20: note = Target: SCN10A; (+) strand; PAM type: YTN; PAM sequence: CTT
  source 1..20: mol_type = other DNA
taatggcctgagctgtttga

SEQ ID NO: 70832 - DNA, 20 bp, synthetic construct
  misc_feature 1..20: note = Description of Artificial Sequence: Synthetic oligonucleotide
  misc_feature 1..20: note = Target: SCN10A; (+) strand; PAM type: YTN; PAM sequence: TTT
  source 1..20: mol_type = other DNA
aatggcctgagctgtttgac

SEQ ID NO: 70833 - DNA, 20 bp, synthetic construct
  misc_feature 1..20: note = Description of Artificial Sequence: Synthetic oligonucleotide
  misc_feature 1..20: note = Target: SCN10A; (+) strand; PAM type: YTN; PAM sequence: TTA
  source 1..20: mol_type = other DNA
atggcctgagctgtttgacc

SEQ ID NO: 70834 - DNA, 20 bp, synthetic construct
  misc_feature 1..20: note = Description of Artificial Sequence: Synthetic oligonucleotide
  misc_feature 1..20: note = Target: SCN10A; (+) strand; PAM type: YTN; PAM sequence: CTG
  source 1..20: mol_type = other DNA
agctgtttgacctccagccg

SEQ ID NO: 70835 - DNA, 20 bp, synthetic construct
  misc_feature 1..20: note = Description of Artificial Sequence: Synthetic oligonucleotide
  misc_feature 1..20: note = Target: SCN10A; (+) strand; PAM type: YTN; PAM sequence: CTG
  source 1..20: mol_type = other DNA
tttgacctccagccggtagg

SEQ ID NO: 70836 - DNA, 20 bp, synthetic construct
  misc_feature 1..20: note = Description of Artificial Sequence: Synthetic oligonucleotide
  misc_feature 1..20: note = Target: SCN10A; (+) strand; PAM type: YTN; PAM sequence: TTT
  source 1..20: mol_type = other DNA
gacctccagccggtaggtga

SEQ ID NO: 70837 - DNA, 20 bp, synthetic construct
  misc_feature 1..20: note = Description of Artificial Sequence: Synthetic oligonucleotide
  misc_feature 1..20: note = Target: SCN10A; (+) strand; PAM type: YTN; PAM sequence: TTG
  source 1..20: mol_type = other DNA
acctccagccggtaggtgat

SEQ ID NO: 70838 - DNA, 20 bp, synthetic construct
  misc_feature 1..20: note = Description of Artificial Sequence: Synthetic oligonucleotide
  misc_feature 1..20: note = Target: SCN10A; (+) strand; PAM type: YTN; PAM sequence: CTC
  source 1..20: mol_type = other DNA
cagccggtaggtgatgcttt

SEQ ID NO: 70839 - DNA, 20 bp, synthetic construct
  misc_feature 1..20: note = Description of Artificial Sequence: Synthetic oligonucleotide
  misc_feature 1..20: note = Target: SCN10A; (+) strand; PAM type: YTN; PAM sequence: CTT
  source 1..20: mol_type = other DNA
tcaagagagcactagtgcat

SEQ ID NO: 70840 - DNA, 20 bp, synthetic construct
  misc_feature 1..20: note = Description of Artificial Sequence: Synthetic oligonucleotide
  misc_feature 1..20: note = Target: SCN10A; (+) strand; PAM type: YTN; PAM sequence: TTT
  source 1..20: mol_type = other DNA
caagagagcactagtgcatt

SEQ ID NO: 70841 - DNA, 20 bp, synthetic construct
  misc_feature 1..20: note = Description of Artificial Sequence: Synthetic oligonucleotide
  misc_feature 1..20: note = Target: SCN10A; (+) strand; PAM type: YTN; PAM sequence: TTC
  source 1..20: mol_type = other DNA
aagagagcactagtgcatta

SEQ ID NO: 70842 - DNA, 20 bp, synthetic construct
  misc_feature 1..20: note = Description of Artificial Sequence: Synthetic oligonucleotide
  misc_feature 1..20: note = Target: SCN10A; (+) strand; PAM type: YTN; PAM sequence: CTA
  source 1..20: mol_type = other DNA
gtgcattagtagaaggggga

SEQ ID NO: 70843 - DNA, 20 bp, synthetic construct
  misc_feature 1..20: note = Description of Artificial Sequence: Synthetic oligonucleotide
  misc_feature 1..20: note = Target: SCN10A; (+) strand; PAM type: YTN; PAM sequence: TTA
  source 1..20: mol_type = other DNA
gtagaagggggatctaagct

SEQ ID NO: 70844 - DNA, 20 bp, synthetic construct
  misc_feature 1..20: note = Description of Artificial Sequence: Synthetic oligonucleotide
  misc_feature 1..20: note = Target: SCN10A; (+) strand; PAM type: YTN; PAM sequence: CTA
  source 1..20: mol_type = other DNA
agctcaccctaagttggcca

SEQ ID NO: 70845 - DNA, 20 bp, synthetic construct
  misc_feature 1..20: note = Description of Artificial Sequence: Synthetic oligonucleotide
  misc_feature 1..20: note = Target: SCN10A; (+) strand; PAM type: YTN; PAM sequence: CTC
  source 1..20: mol_type = other DNA
accctaagttggccagggta

SEQ ID NO: 70846 - DNA, 20 bp, synthetic construct
  misc_feature 1..20: note = Description of Artificial Sequence: Synthetic oligonucleotide
  misc_feature 1..20: note = Target: SCN10A; (+) strand; PAM type: YTN; PAM sequence: CTA
  source 1..20: mol_type = other DNA
agttggccagggtaaatatt

SEQ ID NO: 70847 - DNA, 20 bp, synthetic construct
  misc_feature 1..20: note = Description of Artificial Sequence: Synthetic oligonucleotide
  misc_feature 1..20: note = Target: SCN10A; (+) strand; PAM type: YTN; PAM sequence: TTG
  source 1..20: mol_type = other DNA
gccagggtaaatattttagt

SEQ ID NO: 70848 - DNA, 20 bp, synthetic construct
  misc_feature 1..20: note = Description of Artificial Sequence: Synthetic oligonucleotide
  misc_feature 1..20: note = Target: SCN10A; (+) strand; PAM type: YTN; PAM sequence: TTT
  source 1..20: mol_type = other DNA
tagtttcttaggtgatgagc

SEQ ID NO: 70849 - DNA, 20 bp, synthetic construct
  misc_feature 1..20: note = Description of Artificial Sequence: Synthetic oligonucleotide
  misc_feature 1..20: note = Target: SCN10A; (+) strand; PAM type: YTN; PAM sequence: TTT
  source 1..20: mol_type = other DNA
agtttcttaggtgatgagca

SEQ ID NO: 70850 - DNA, 20 bp, synthetic construct
  misc_feature 1..20: note = Description of Artificial Sequence: Synthetic oligonucleotide
  misc_feature 1..20: note = Target: SCN10A; (+) strand; PAM type: YTN; PAM sequence: TTA
  source 1..20: mol_type = other DNA
gtttcttaggtgatgagcag

SEQ ID NO: 70851 - DNA, 20 bp, synthetic construct
  misc_feature 1..20: note = Description of Artificial Sequence: Synthetic oligonucleotide
  misc_feature 1..20: note = Target: SCN10A; (+) strand; PAM type: YTN; PAM sequence: TTT
  source 1..20: mol_type = other DNA
cttaggtgatgagcagggcc

SEQ ID NO: 70852 - DNA, 20 bp, synthetic construct
  misc_feature 1..20: note = Description of Artificial Sequence: Synthetic oligonucleotide
  misc_feature 1..20: note = Target: SCN10A; (+) strand; PAM type: YTN; PAM sequence: TTC
  source 1..20: mol_type = other DNA
ttaggtgatgagcagggcca

SEQ ID NO: 70853 - DNA, 20 bp, synthetic construct
  misc_feature 1..20: note = Description of Artificial Sequence: Synthetic oligonucleotide
  misc_feature 1..20: note = Target: SCN10A; (+) strand; PAM type: YTN; PAM sequence: CTT
  source 1..20: mol_type = other DNA
aggtgatgagcagggccata

SEQ ID NO: 70854 - DNA, 20 bp, synthetic construct
  misc_feature 1..20: note = Description of Artificial Sequence: Synthetic oligonucleotide
  misc_feature 1..20: note = Target: SCN10A; (+) strand; PAM type: YTN; PAM sequence: TTA
  source 1..20: mol_type = other DNA
ggtgatgagcagggccataa

SEQ ID NO: 70855 - DNA, 20 bp, synthetic construct
  misc_feature 1..20: note = Description of Artificial Sequence: Synthetic oligonucleotide
  misc_feature 1..20: note = Target: SCN10A; (+) strand; PAM type: YTN; PAM sequence: CTT
  source 1..20: mol_type = other DNA
ccgagagtttctgggttttg

SEQ ID NO: 70856 - DNA, 20 bp, synthetic construct
  misc_feature 1..20: note = Description of Artificial Sequence: Synthetic oligonucleotide
  misc_feature 1..20: note = Target: SCN10A; (+) strand; PAM type: YTN; PAM sequence: TTC
  source 1..20: mol_type = other DNA
cgagagtttctgggttttgt

SEQ ID NO: 70857 - DNA, 20 bp, synthetic construct
  misc_feature 1..20: note = Description of Artificial Sequence: Synthetic oligonucleotide
  misc_feature 1..20: note = Target: SCN10A; (+) strand; PAM type: YTN; PAM sequence: TTT
  source 1..20: mol_type = other DNA
ctgggttttgtgttcagcta

SEQ ID NO: 70858 - DNA, 20 bp, synthetic construct
  misc_feature 1..20: note = Description of Artificial Sequence: Synthetic oligonucleotide
  misc_feature 1..20: note = Target: SCN10A; (+) strand; PAM type: YTN; PAM sequence: TTC
  source 1..20: mol_type = other DNA
tgggttttgtgttcagctac

SEQ ID NO: 70859 - DNA, 20 bp, synthetic construct
  misc_feature 1..20: note = Description of Artificial Sequence: Synthetic oligonucleotide
  misc_feature 1..20: note = Target: SCN10A; (+) strand; PAM type: YTN; PAM sequence: CTG
  source 1..20: mol_type = other DNA
ggttttgtgttcagctacca

SEQ ID NO: 70860 - DNA, 20 bp, synthetic construct
  misc_feature 1..20: note = Description of Artificial Sequence: Synthetic oligonucleotide
  misc_feature 1..20: note = Target: SCN10A; (+) strand; PAM type: YTN; PAM sequence: TTT
  source 1..20: mol_type = other DNA
tgtgttcagctaccaaggca

SEQ ID NO: 70861 - DNA, 20 bp, synthetic construct
  misc_feature 1..20: note = Description of Artificial Sequence: Synthetic oligonucleotide
  misc_feature 1..20: note = Target: SCN10A; (+) strand; PAM type: YTN; PAM sequence: TTT
  source 1..20: mol_type = other DNA
gtgttcagctaccaaggcag

SEQ ID NO: 70862 - DNA, 20 bp, synthetic construct
  misc_feature 1..20: note = Description of Artificial Sequence: Synthetic oligonucleotide
  misc_feature 1..20: note = Target: SCN10A; (+) strand; PAM type: YTN; PAM sequence: TTG
  source 1..20: mol_type = other DNA
tgttcagctaccaaggcagg

SEQ ID NO: 70863 - DNA, 20 bp, synthetic construct
  misc_feature 1..20: note = Description of Artificial Sequence: Synthetic oligonucleotide
  misc_feature 1..20: note = Target: SCN10A; (+) strand; PAM type: YTN; PAM sequence: TTC
  source 1..20: mol_type = other DNA
agctaccaaggcaggtaggg

SEQ ID NO: 70864 - DNA, 20 bp, synthetic construct
  misc_feature 1..20: note = Description of Artificial Sequence: Synthetic oligonucleotide
  misc_feature 1..20: note = Target: SCN10A; (+) strand; PAM type: YTN; PAM sequence: CTA
  source 1..20: mol_type = other DNA
ccaaggcaggtagggaaata

SEQ ID NO: 70865 - DNA, 20 bp, synthetic construct
  misc_feature 1..20: note = Description of Artificial Sequence: Synthetic oligonucleotide
  misc_feature 1..20: note = Target: SCN10A; (+) strand; PAM type: YTN; PAM sequence: CTA
  source 1..20: mol_type = other DNA
gactcagacccttcttgggt

SEQ ID NO: 70866 - DNA, 20 bp, synthetic construct
  misc_feature 1..20: note = Description of Artificial Sequence: Synthetic oligonucleotide
  misc_feature 1..20: note = Target: SCN10A; (+) strand; PAM type: YTN; PAM sequence: CTC
  source 1..20: mol_type = other DNA
agacccttcttgggtaggga

SEQ ID NO: 70867 - DNA, 20 bp, synthetic construct
  misc_feature 1..20: note = Description of Artificial Sequence: Synthetic oligonucleotide
  misc_feature 1..20: note = Target: SCN10A; (+) strand; PAM type: YTN; PAM sequence: CTT
  source 1..20: mol_type = other DNA
cttgggtagggattgctgtg

SEQ ID NO: 70868 - DNA, 20 bp, synthetic construct
  misc_feature 1..20: note = Description of Artificial Sequence: Synthetic oligonucleotide
  misc_feature 1..20: note = Target: SCN10A; (+) strand; PAM type: YTN; PAM sequence: TTC
  source 1..20: mol_type = other DNA
ttgggtagggattgctgtgg

SEQ ID NO: 70869 - DNA, 20 bp, synthetic construct
  misc_feature 1..20: note = Description of Artificial Sequence: Synthetic oligonucleotide
  misc_feature 1..20: note = Target: SCN10A; (+) strand; PAM type: YTN; PAM sequence: CTT
  source 1..20: mol_type = other DNA
gggtagggattgctgtggcc

SEQ ID NO: 70870 - DNA, 20 bp, synthetic construct
  misc_feature 1..20: note = Description of Artificial Sequence: Synthetic oligonucleotide
  misc_feature 1..20: note = Target: SCN10A; (+) strand; PAM type: YTN; PAM sequence: TTG
  source 1..20: mol_type = other DNA
ggtagggattgctgtggcca

SEQ ID NO: 70871 - DNA, 20 bp, synthetic construct
  misc_feature 1..20: note = Description of Artificial Sequence: Synthetic oligonucleotide
  misc_feature 1..20: note = Target: SCN10A; (+) strand; PAM type: YTN; PAM sequence: TTG
  source 1..20: mol_type = other DNA
ctgtggccactgtggtggat

SEQ ID NO: 70872 - DNA, 20 bp, synthetic construct
  misc_feature 1..20: note = Description of Artificial Sequence: Synthetic oligonucleotide
  misc_feature 1..20: note = Target: SCN10A; (+) strand; PAM type: YTN; PAM sequence: CTG
  source 1..20: mol_type = other DNA
tggccactgtggtggatggg

SEQ ID NO: 70873 - DNA, 20 bp, synthetic construct
  misc_feature 1..20: note = Description of Artificial Sequence: Synthetic oligonucleotide
  misc_feature 1..20: note = Target: SCN10A; (+) strand; PAM type: YTN; PAM sequence: CTG
  source 1..20: mol_type = other DNA
tggtggatgggggttggttc

SEQ ID NO: 70874 - DNA, 20 bp, synthetic construct
  misc_feature 1..20: note = Description of Artificial Sequence: Synthetic oligonucleotide
  misc_feature 1..20: note = Target: SCN10A; (+) strand; PAM type: YTN; PAM sequence: TTG
  source 1..20: mol_type = other DNA
gttctcaggccagtggggtt

SEQ ID NO: 70875 - DNA, 20 bp, synthetic construct
  misc_feature 1..20: note = Description of Artificial Sequence: Synthetic oligonucleotide
  misc_feature 1..20: note = Target: SCN10A; (+) strand; PAM type: YTN; PAM sequence: TTC
  source 1..20: mol_type = other DNA
tcaggccagtggggttgtgt

SEQ ID NO: 70876 - DNA, 20 bp, synthetic construct
  misc_feature 1..20: note = Description of Artificial Sequence: Synthetic oligonucleotide
  misc_feature 1..20: note = Target: SCN10A; (+) strand; PAM type: YTN; PAM sequence: CTC
  source 1..20: mol_type = other DNA
aggccagtggggttgtgttc

SEQ ID NO: 70877 - DNA, 20 bp, synthetic construct
  misc_feature 1..20: note = Description of Artificial Sequence: Synthetic oligonucleotide
  misc_feature 1..20: note = Target: SCN10A; (+) strand; PAM type: YTN; PAM sequence: TTG
  source 1..20: mol_type = other DNA
tgttccagagggaattttgg

SEQ ID NO: 70878 - DNA, 20 bp, synthetic construct
  misc_feature 1..20: note = Description of Artificial Sequence: Synthetic oligonucleotide
  misc_feature 1..20: note = Target: SCN10A; (+) strand; PAM type: YTN; PAM sequence: TTC
  source 1..20: mol_type = other DNA
cagagggaattttggctgcc

SEQ ID NO: 70879 - DNA, 20 bp, synthetic construct
  misc_feature 1..20: note = Description of Artificial Sequence: Synthetic oligonucleotide
  misc_feature 1..20: note = Target: SCN10A; (+) strand; PAM type: YTN; PAM sequence: TTT
  source 1..20: mol_type = other DNA
tggctgcctctgctgtgcca

SEQ ID NO: 70880 - DNA, 20 bp, synthetic construct
  misc_feature 1..20: note = Description of Artificial Sequence: Synthetic oligonucleotide
  misc_feature 1..20: note = Target: SCN10A; (+) strand; PAM type: YTN; PAM sequence: TTT
  source 1..20: mol_type = other DNA
ggctgcctctgctgtgccat

SEQ ID NO: 70881 - DNA, 20 bp, synthetic construct
  misc_feature 1..20: note = Description of Artificial Sequence: Synthetic oligonucleotide
  misc_feature 1..20: note = Target: SCN10A; (+) strand; PAM type: YTN; PAM sequence: TTG
  source 1..20: mol_type = other DNA
gctgcctctgctgtgccata

SEQ ID NO: 70882 - DNA, 20 bp, synthetic construct
  misc_feature 1..20: note = Description of Artificial Sequence: Synthetic oligonucleotide
  misc_feature 1..20: note = Target: SCN10A; (+) strand; PAM type: YTN; PAM sequence: CTG
  source 1..20: mol_type = other DNA
cctctgctgtgccatagagt

SEQ ID NO: 70883 - DNA, 20 bp, synthetic construct
  misc_feature 1..20: note = Description of Artificial Sequence: Synthetic oligonucleotide
  misc_feature 1..20: note = Target: SCN10A; (+) strand; PAM type: YTN; PAM sequence: CTC
  source 1..20: mol_type = other DNA
tgctgtgccatagagttctc

SEQ ID NO: 70884 - DNA, 20 bp, synthetic construct
  misc_feature 1..20: note = Description of Artificial Sequence: Synthetic oligonucleotide
  misc_feature 1..20: note = Target: SCN10A; (+) strand; PAM type: YTN; PAM sequence: CTG
  source 1..20: mol_type = other DNA
ctgtgccatagagttctcca

SEQ ID NO: 70885 - DNA, 20 bp, synthetic construct
  misc_feature 1..20: note = Description of Artificial Sequence: Synthetic oligonucleotide
  misc_feature 1..20: note = Target: SCN10A; (+) strand; PAM type: YTN; PAM sequence: CTG
  source 1..20: mol_type = other DNA
tgccatagagttctccaggg

SEQ ID NO: 70886 - DNA, 20 bp, synthetic construct
  misc_feature 1..20: note = Description of Artificial Sequence: Synthetic oligonucleotide
  misc_feature 1..20: note = Target: SCN10A; (+) strand; PAM type: YTN; PAM sequence: TTC
  source 1..20: mol_type = other DNA
tccagggaagtgggggatag

SEQ ID NO: 70887 - DNA, 20 bp, synthetic construct
  misc_feature 1..20: note = Description of Artificial Sequence: Synthetic oligonucleotide
  misc_feature 1..20: note = Target: SCN10A; (+) strand; PAM type: YTN; PAM sequence: CTC
  source 1..20: mol_type = other DNA
cagggaagtgggggatagct

SEQ ID NO: 70888 - DNA, 20 bp, synthetic construct
  misc_feature 1..20: note = Description of Artificial Sequence: Synthetic oligonucleotide
  misc_feature 1..20: note = Target: SCN10A; (+) strand; PAM type: YTN; PAM sequence: CTG
  source 1..20: mol_type = other DNA
ctagtgagaggcctcaccta

SEQ ID NO: 70889 - DNA, 20 bp, synthetic construct
  misc_feature 1..20: note = Description of Artificial Sequence: Synthetic oligonucleotide
  misc_feature 1..20: note = Target: SCN10A; (+) strand; PAM type: YTN; PAM sequence: CTA
  source 1..20: mol_type = other DNA
gtgagaggcctcacctagct

SEQ ID NO: 70890 - DNA, 20 bp, synthetic construct
  misc_feature 1..20: note = Description of Artificial Sequence: Synthetic oligonucleotide
  misc_feature 1..20: note = Target: SCN10A; (+) strand; PAM type: YTN; PAM sequence: CTC
  source 1..20: mol_type = other DNA
acctagctctcatgtagttg

SEQ ID NO: 70891 - DNA, 20 bp, synthetic construct
  misc_feature 1..20: note = Description of Artificial Sequence: Synthetic oligonucleotide
  misc_feature 1..20: note = Target: SCN10A; (+) strand; PAM type: YTN; PAM sequence: CTA
  source 1..20: mol_type = other DNA
gctctcatgtagttggtgag

SEQ ID NO: 70892 - DNA, 20 bp, synthetic construct
  misc_feature 1..20: note = Description of Artificial Sequence: Synthetic oligonucleotide
  misc_feature 1..20: note = Target: SCN10A; (+) strand; PAM type: YTN; PAM sequence: CTC
  source 1..20: mol_type = other DNA
tcatgtagttggtgaggctg

SEQ ID NO: 70893 - DNA, 20 bp, synthetic construct
  misc_feature 1..20: note = Description of Artificial Sequence: Synthetic oligonucleotide
  misc_feature 1..20: note = Target: SCN10A; (+) strand; PAM type: YTN; PAM sequence: CTC
  source 1..20: mol_type = other DNA
atgtagttggtgaggctggt

SEQ ID NO: 70894 - DNA, 20 bp, synthetic construct
  misc_feature 1..20: note = Description of Artificial Sequence: Synthetic oligonucleotide
  misc_feature 1..20: note = Target: SCN10A; (+) strand; PAM type: YTN; PAM sequence: TTG
  source 1..20: mol_type = other DNA
gtgaggctggtcttgctcct

SEQ ID NO: 70895 - DNA, 20 bp, synthetic construct
  misc_feature 1..20: note = Description of Artificial Sequence: Synthetic oligonucleotide
  misc_feature 1..20: note = Target: SCN10A; (+) strand; PAM type: YTN; PAM sequence: CTG
  source 1..20: mol_type = other DNA
gtcttgctcctgcagtgccc

SEQ ID NO: 70896 - DNA, 20 bp, synthetic construct
  misc_feature 1..20: note = Description of Artificial Sequence: Synthetic oligonucleotide
  misc_feature 1..20: note = Target: SCN10A; (+) strand; PAM type: YTN; PAM sequence: CTT
  source 1..20: mol_type = other DNA
gctcctgcagtgccctactc

SEQ ID NO: 70897 - DNA, 20 bp, synthetic construct
  misc_feature 1..20: note = Description of Artificial Sequence: Synthetic oligonucleotide
  misc_feature 1..20: note = Target: SCN10A; (+) strand; PAM type: YTN; PAM sequence: TTG
  source 1..20: mol_type = other DNA
ctcctgcagtgccctactca

SEQ ID NO: 70898 - DNA, 20 bp, synthetic construct
  misc_feature 1..20: note = Description of Artificial Sequence: Synthetic oligonucleotide
  misc_feature 1..20: note = Target: SCN10A; (+) strand; PAM type: YTN; PAM sequence: CTC
  source 1..20: mol_type = other DNA
ctgcagtgccctactcagac

SEQ ID NO: 70899 - DNA, 20 bp, synthetic construct
  misc_feature 1..20: note = Description of Artificial Sequence: Synthetic oligonucleotide
  misc_feature 1..20: note = Target: SCN10A; (+) strand; PAM type: YTN; PAM sequence: CTG
  source 1..20: mol_type = other DNA
cagtgccctactcagacctt

SEQ ID NO: 70900 - DNA, 20 bp, synthetic construct
  misc_feature 1..20: note = Description of Artificial Sequence: Synthetic oligonucleotide
  misc_feature 1..20: note = Target: SCN10A; (+) strand; PAM type: YTN; PAM sequence: CTA
  source 1..20: mol_type = other DNA
ctcagaccttgccccaggct

SEQ ID NO: 70901 - DNA, 20 bp, synthetic construct
  misc_feature 1..20: note = Description of Artificial Sequence: Synthetic oligonucleotide
  misc_feature 1..20: note = Target: SCN10A; (+) strand; PAM type: YTN; PAM sequence: CTC
  source 1..20: mol_type = other DNA
agaccttgccccaggctgtg

SEQ ID NO: 70902 - DNA, 20 bp, synthetic construct
  misc_feature 1..20: note = Description of Artificial Sequence: Synthetic oligonucleotide
  misc_feature 1..20: note = Target: SCN10A; (+) strand; PAM type: YTN; PAM sequence: CTT
  source 1..20: mol_type = other DNA
gccccaggctgtgagcttcc

SEQ ID NO: 70903 - DNA, 20 bp, synthetic construct
  misc_feature 1..20: note = Description of Artificial Sequence: Synthetic oligonucleotide
  misc_feature 1..20: note = Target: SCN10A; (+) strand; PAM type: YTN; PAM sequence: TTG
  source 1..20: mol_type = other DNA
ccccaggctgtgagcttccc

SEQ ID NO: 70904 - DNA, 20 bp, synthetic construct
  misc_feature 1..20: note = Description of Artificial Sequence: Synthetic oligonucleotide
  misc_feature 1..20: note = Target: SCN10A; (+) strand; PAM type: YTN; PAM sequence: CTG
  source 1..20: mol_type = other DNA
tgagcttccccactgagaaa

SEQ ID NO: 70905 - DNA, 20 bp, synthetic construct
  misc_feature 1..20: note = Description of Artificial Sequence: Synthetic oligonucleotide
  misc_feature 1..20: note = Target: SCN10A; (+) strand; PAM type: YTN; PAM sequence: CTT
  source 1..20: mol_type = other DNA
ccccactgagaaagaaagca

SEQ ID NO: 70906 - DNA, 20 bp, synthetic construct
  misc_feature 1..20: note = Description of Artificial Sequence: Synthetic oligonucleotide
  misc_feature 1..20: note = Target: SCN10A; (+) strand; PAM type: YTN; PAM sequence: TTC
  source 1..20: mol_type = other DNA
cccactgagaaagaaagcat

SEQ ID NO: 70907 - DNA, 20 bp, synthetic construct
  misc_feature 1..20: note = Description of Artificial Sequence: Synthetic oligonucleotide
  misc_feature 1..20: note = Target: SCN10A; (+) strand; PAM type: YTN; PAM sequence: CTG
  source 1..20: mol_type = other DNA
agaaagaaagcatgactttt

SEQ ID NO: 70908 - DNA, 20 bp, synthetic construct
  misc_feature 1..20: note = Description of Artificial Sequence: Synthetic oligonucleotide
  misc_feature 1..20: note = Target: SCN10A; (+) strand; PAM type: YTN; PAM sequence: CTT
  source 1..20: mol_type = other DNA
ttggaccgcatccctcactg

SEQ ID NO: 70909 - DNA, 20 bp, synthetic construct
  misc_feature 1..20: note = Description of Artificial Sequence: Synthetic oligonucleotide
  misc_feature 1..20: note = Target: SCN10A; (+) strand; PAM type: YTN; PAM sequence: TTT
  source 1..20: mol_type = other DNA
tggaccgcatccctcactgt

SEQ ID NO: 70910 - DNA, 20 bp, synthetic construct
  misc_feature 1..20: note = Description of Artificial Sequence: Synthetic oligonucleotide
  misc_feature 1..20: note = Target: SCN10A; (+) strand; PAM type: YTN; PAM sequence: TTT
  source 1..20: mol_type = other DNA
ggaccgcatccctcactgtc

SEQ ID NO: 70911 - DNA, 20 bp, synthetic construct
  misc_feature 1..20: note = Description of Artificial Sequence: Synthetic oligonucleotide
  misc_feature 1..20: note = Target: SCN10A; (+) strand; PAM type: YTN; PAM sequence: TTG
  source 1..20: mol_type = other DNA
gaccgcatccctcactgtct

SEQ ID NO: 70912 - DNA, 20 bp, synthetic construct
  misc_feature 1..20: note = Description of Artificial Sequence: Synthetic oligonucleotide
  misc_feature 1..20: note = Target: SCN10A; (+) strand; PAM type: YTN; PAM sequence: CTC
  source 1..20: mol_type = other DNA
actgtctgcttgcagttccc

SEQ ID NO: 70913 - DNA, 20 bp, synthetic construct
  misc_feature 1..20: note = Description of Artificial Sequence: Synthetic oligonucleotide
  misc_feature 1..20: note = Target: SCN10A; (+) strand; PAM type: YTN; PAM sequence: CTG
  source 1..20: mol_type = other DNA
tctgcttgcagttcccattt

SEQ ID NO: 70914 - DNA, 20 bp, synthetic construct
  misc_feature 1..20: note = Description of Artificial Sequence: Synthetic oligonucleotide
  misc_feature 1..20: note = Target: SCN10A; (+) strand; PAM type: YTN; PAM sequence: CTG
  source 1..20: mol_type = other DNA
cttgcagttcccatttgccc

SEQ ID NO: 70915 - DNA, 20 bp, synthetic construct
  misc_feature 1..20: note = Description of Artificial Sequence: Synthetic oligonucleotide
  misc_feature 1..20: note = Target: SCN10A; (+) strand; PAM type: YTN; PAM sequence: CTT
  source 1..20: mol_type = other DNA
gcagttcccatttgccccct

SEQ ID NO: 70916 - DNA, 20 bp, synthetic construct
  misc_feature 1..20: note = Description of Artificial Sequence: Synthetic oligonucleotide
  misc_feature 1..20: note = Target: SCN10A; (+) strand; PAM type: YTN; PAM sequence: TTG
  source 1..20: mol_type = other DNA
cagttcccatttgccccctg

SEQ ID NO: 70917 - DNA, 20 bp, synthetic construct
  misc_feature 1..20: note = Description of Artificial Sequence: Synthetic oligonucleotide
  misc_feature 1..20: note = Target: SCN10A; (+) strand; PAM type: YTN; PAM sequence: TTC
  source 1..20: mol_type = other DNA
ccatttgccccctggattct

SEQ ID NO: 70918 - DNA, 20 bp, synthetic construct
  misc_feature 1..20: note = Description of Artificial Sequence: Synthetic oligonucleotide
  misc_feature 1..20: note = Target: SCN10A; (+) strand; PAM type: YTN; PAM sequence: TTT
  source 1..20: mol_type = other DNA
gccccctggattctgctcaa

SEQ ID NO: 70919 - DNA, 20 bp, synthetic construct
  misc_feature 1..20: note = Description of Artificial Sequence: Synthetic oligonucleotide
  misc_feature 1..20: note = Target: SCN10A; (+) strand; PAM type: YTN; PAM sequence: TTG
  source 1..20: mol_type = other DNA
ccccctggattctgctcaag

SEQ ID NO: 70920 - DNA, 20 bp, synthetic construct
  misc_feature 1..20: note = Description of Artificial Sequence: Synthetic oligonucleotide
  misc_feature 1..20: note = Target: SCN10A; (+) strand; PAM type: YTN; PAM sequence: CTG
  source 1..20: mol_type = other DNA
gattctgctcaagaaaattt

SEQ ID NO: 70921 - DNA, 20 bp, synthetic construct
  misc_feature 1..20: note = Description of Artificial Sequence: Synthetic oligonucleotide
  misc_feature 1..20: note = Target: SCN10A; (+) strand; PAM type: YTN; PAM sequence: TTC
  source 1..20: mol_type = other DNA
tgctcaagaaaatttgtgcc

SEQ ID NO: 70922 - DNA, 20 bp, synthetic construct
  misc_feature 1..20: note = Description of Artificial Sequence: Synthetic oligonucleotide
  misc_feature 1..20: note = Target: SCN10A; (+) strand; PAM type: YTN; PAM sequence: CTG
  source 1..20: mol_type = other DNA
ctcaagaaaatttgtgccca

SEQ ID NO: 70923 - DNA, 20 bp, synthetic construct
  misc_feature 1..20: note = Description of Artificial Sequence: Synthetic oligonucleotide
  misc_feature 1..20: note = Target: SCN10A; (+) strand; PAM type: YTN; PAM sequence: CTC
  source 1..20: mol_type = other DNA
aagaaaatttgtgcccagtt

SEQ ID NO: 70924 - DNA, 20 bp, synthetic construct
  misc_feature 1..20: note = Description of Artificial Sequence: Synthetic oligonucleotide
  misc_feature 1..20: note = Target: SCN10A; (+) strand; PAM type: YTN; PAM sequence: TTT
  source 1..20: mol_type = other DNA
gtgcccagttgaaattatta

SEQ ID NO: 70925 - DNA, 20 bp, synthetic construct
  misc_feature 1..20: note = Description of Artificial Sequence: Synthetic oligonucleotide
  misc_feature 1..20: note = Target: SCN10A; (+) strand; PAM type: YTN; PAM sequence: TTG
  source 1..20: mol_type = other DNA
tgcccagttgaaattattac

SEQ ID NO: 70926 - DNA, 20 bp, synthetic construct
  misc_feature 1..20: note = Description of Artificial Sequence: Synthetic oligonucleotide
  misc_feature 1..20: note = Target: SCN10A; (+) strand; PAM type: YTN; PAM sequence: TTG
  source 1..20: mol_type = other DNA
aaattattactaattttagt

SEQ ID NO: 70927 - DNA, 20 bp, synthetic construct
  misc_feature 1..20: note = Description of Artificial Sequence: Synthetic oligonucleotide
  misc_feature 1..20: note = Target: SCN10A; (+) strand; PAM type: YTN; PAM sequence: TTA
  source 1..20: mol_type = other DNA
ttactaattttagttgaaac

SEQ ID NO: 70928 - DNA, 20 bp, synthetic construct
  misc_feature 1..20: note = Description of Artificial Sequence: Synthetic oligonucleotide
  misc_feature 1..20: note = Target: SCN10A; (+) strand; PAM type: YTN; PAM sequence: TTA
  source 1..20: mol_type = other DNA
ctaattttagttgaaacttc

SEQ ID NO: 70929 - DNA, 20 bp, synthetic construct
  misc_feature 1..20: note = Description of Artificial Sequence: Synthetic oligonucleotide
  misc_feature 1..20: note = Target: SCN10A; (+) strand; PAM type: YTN; PAM sequence: CTA
  source 1..20: mol_type = other DNA
attttagttgaaacttcttt

SEQ ID NO: 70930 - DNA, 20 bp, synthetic construct
  misc_feature 1..20: note = Description of Artificial Sequence: Synthetic oligonucleotide
  misc_feature 1..20: note = Target: SCN10A; (+) strand; PAM type: YTN; PAM sequence: TTT
  source 1..20: mol_type = other DNA
tagttgaaacttctttcatc

SEQ ID NO: 70931 - DNA, 20 bp, synthetic construct
  misc_feature 1..20: note = Description of Artificial Sequence: Synthetic oligonucleotide
  misc_feature 1..20: note = Target: SCN10A; (+) strand; PAM type: YTN; PAM sequence: TTT
  source 1..20: mol_type = other DNA
agttgaaacttctttcatcc

SEQ ID NO: 70932 - DNA, 20 bp, synthetic construct
  misc_feature 1..20: note = Description of Artificial Sequence: Synthetic oligonucleotide
  misc_feature 1..20: note = Target: SCN10A; (+) strand; PAM type: YTN; PAM sequence: TTA
  source 1..20: mol_type = other DNA
gttgaaacttctttcatcct

SEQ ID NO: 70933 - DNA, 20 bp, synthetic construct
  misc_feature 1..20: note = Description of Artificial Sequence: Synthetic oligonucleotide
  misc_feature 1..20: note = Target: SCN10A; (+) strand; PAM type: YTN; PAM sequence: TTG
  source 1..20: mol_type = other DNA
aaacttctttcatcctgtga

SEQ ID NO: 70934 - DNA, 20 bp, synthetic construct
  misc_feature 1..20: note = Description of Artificial Sequence: Synthetic oligonucleotide
  misc_feature 1..20: note = Target: SCN10A; (+) strand; PAM type: YTN; PAM sequence: CTT
  source 1..20: mol_type = other DNA
ctttcatcctgtgacccctc

SEQ ID NO: 70935 - DNA, 20 bp, synthetic construct
  misc_feature 1..20: note = Description of Artificial Sequence: Synthetic oligonucleotide
  misc_feature 1..20: note = Target: SCN10A; (+) strand; PAM type: YTN; PAM sequence: TTC
  source 1..20: mol_type = other DNA
tttcatcctgtgacccctcc

SEQ ID NO: 70936 - DNA, 20 bp, synthetic construct
  misc_feature 1..20: note = Description of Artificial Sequence: Synthetic oligonucleotide
  misc_feature 1..20: note = Target: SCN10A; (+) strand; PAM type: YTN; PAM sequence: CTT
  source 1..20: mol_type = other DNA
tcatcctgtgacccctccct

SEQ ID NO: 70937 - DNA, 20 bp, synthetic construct
  misc_feature 1..20: note = Description of Artificial Sequence: Synthetic oligonucleotide
  misc_feature 1..20: note = Target: SCN10A; (+) strand; PAM type: YTN; PAM sequence: TTT
  source 1..20: mol_type = other DNA
catcctgtgacccctccctg

SEQ ID NO: 70938 - DNA, 20 bp, synthetic construct
  misc_feature 1..20: note = Description of Artificial Sequence: Synthetic oligonucleotide
  misc_feature 1..20: note = Target: SCN10A; (+) strand; PAM type: YTN; PAM sequence: TTC
  source 1..20: mol_type = other DNA
atcctgtgacccctccctga

SEQ ID NO: 70939 - DNA, 20 bp, synthetic construct
  misc_feature 1..20: note = Description of Artificial Sequence: Synthetic oligonucleotide
  misc_feature 1..20: note = Target: SCN10A; (+) strand; PAM type: YTN; PAM sequence: CTG
  source 1..20: mol_type = other DNA
tgacccctccctgattccac

SEQ ID NO: 70940 - DNA, 20 bp, synthetic construct
  misc_feature 1..20: note = Description of Artificial Sequence: Synthetic oligonucleotide
  misc_feature 1..20: note = Target: SCN10A; (+) strand; PAM type: YTN; PAM sequence: CTC
  source 1..20: mol_type = other DNA
cctgattccactggctgcct

SEQ ID NO: 70941 - DNA, 20 bp, synthetic construct
  misc_feature 1..20: note = Description of Artificial Sequence: Synthetic oligonucleotide
  misc_feature 1..20: note = Target: SCN10A; (+) strand; PAM type: YTN; PAM sequence: CTG
  source 1..20: mol_type = other DNA
attccactggctgccttccc

SEQ ID NO: 70942 - DNA, 20 bp, synthetic construct
  misc_feature 1..20: note = Description of Artificial Sequence: Synthetic oligonucleotide
  misc_feature 1..20: note = Target: SCN10A; (+) strand; PAM type: YTN; PAM sequence: TTC
  source 1..20: mol_type = other DNA
cactggctgccttccccaag

SEQ ID NO: 70943 - DNA, 20 bp, synthetic construct
  misc_feature 1..20: note = Description of Artificial Sequence: Synthetic oligonucleotide
  misc_feature 1..20: note = Target: SCN10A; (+) strand; PAM type: YTN; PAM sequence: CTG
  source 1..20: mol_type = other DNA
gctgccttccccaagggtgc

SEQ ID NO: 70944 - DNA, 20 bp, synthetic construct
  misc_feature 1..20: note = Description of Artificial Sequence: Synthetic oligonucleotide
  misc_feature 1..20: note = Target: SCN10A; (+) strand; PAM type: YTN; PAM sequence: CTG
  source 1..20: mol_type = other DNA
ccttccccaagggtgcctgt

SEQ ID NO: 70945 - DNA, 20 bp, synthetic construct
  misc_feature 1..20: note = Description of Artificial Sequence: Synthetic oligonucleotide
  misc_feature 1..20: note = Target: SCN10A; (+) strand; PAM type: YTN; PAM sequence: CTT
  source 1..20: mol_type = other DNA
ccccaagggtgcctgtgaga

SEQ ID NO: 70946 - DNA, 20 bp, synthetic construct
  misc_feature 1..20: note = Description of Artificial Sequence: Synthetic oligonucleotide
  misc_feature 1..20: note = Target: SCN10A; (+) strand; PAM type: YTN; PAM sequence: TTC
  source 1..20: mol_type = other DNA
cccaagggtgcctgtgagac

SEQ ID NO: 70947 - DNA, 20 bp, synthetic construct
  misc_feature 1..20: note = Description of Artificial Sequence: Synthetic oligonucleotide
  misc_feature 1..20: note = Target: SCN10A; (+) strand; PAM type: YTN; PAM sequence: CTG
  source 1..20: mol_type = other DNA
tgagacatagtcagggatgg

SEQ ID NO: 70948 - DNA, 20 bp, synthetic construct
  misc_feature 1..20: note = Description of Artificial Sequence: Synthetic oligonucleotide
  misc_feature 1..20: note = Target: SCN10A; (+) strand; PAM type: YTN; PAM sequence: TTC
  source 1..20: mol_type = other DNA
cctggtctcaagctggagac

SEQ ID NO: 70949 - DNA, 20 bp, synthetic construct
  misc_feature 1..20: note = Description of Artificial Sequence: Synthetic oligonucleotide
  misc_feature 1..20: note = Target: SCN10A; (+) strand; PAM type: YTN; PAM sequence: CTG
  source 1..20: mol_type = other DNA
gtctcaagctggagactggg

SEQ ID NO: 70950 - DNA, 20 bp, synthetic construct
  misc_feature 1..20: note = Description of Artificial Sequence: Synthetic oligonucleotide
  misc_feature 1..20: note = Target: SCN10A; (+) strand; PAM type: YTN; PAM sequence: CTC
  source 1..20: mol_type = other DNA
aagctggagactgggagtgc

SEQ ID NO: 70951 - DNA, 20 bp, synthetic construct
  misc_feature 1..20: note = Description of Artificial Sequence: Synthetic oligonucleotide
  misc_feature 1..20: note = Target: SCN10A; (+) strand; PAM type: YTN; PAM sequence: CTG
  source 1..20: mol_type = other DNA
gagactgggagtgcctacaa

SEQ ID NO: 70952 - DNA, 20 bp, synthetic construct
  misc_feature 1..20: note = Description of Artificial Sequence: Synthetic oligonucleotide
  misc_feature 1..20: note = Target: SCN10A; (+) strand; PAM type: YTN; PAM sequence: CTG
  source 1..20: mol_type = other DNA
ggagtgcctacaaggcactt

SEQ ID NO: 70953 - DNA, 20 bp, synthetic construct
  misc_feature 1..20: note = Description of Artificial Sequence: Synthetic oligonucleotide
  misc_feature 1..20: note = Target: SCN10A; (+) strand; PAM type: YTN; PAM sequence: CTA
  source 1..20: mol_type = other DNA
caaggcacttccctttgctg

SEQ ID NO: 70954 - DNA, 20 bp, synthetic construct
  misc_feature 1..20: note = Description of Artificial Sequence: Synthetic oligonucleotide
  misc_feature 1..20: note = Target: SCN10A; (+) strand; PAM type: YTN; PAM sequence: CTT
  source 1..20: mol_type = other DNA
ccctttgctgtttctacttt

SEQ ID NO: 70955 - DNA, 20 bp, synthetic construct
  misc_feature 1..20: note = Description of Artificial Sequence: Synthetic oligonucleotide
  misc_feature 1..20: note = Target: SCN10A; (+) strand; PAM type: YTN; PAM sequence: TTC
  source 1..20: mol_type = other DNA
cctttgctgtttctactttt

SEQ ID NO: 70956 - DNA, 20 bp, synthetic construct
  misc_feature 1..20: note = Description of Artificial Sequence: Synthetic oligonucleotide
  misc_feature 1..20: note = Target: SCN10A; (+) strand; PAM type: YTN; PAM sequence: CTT
  source 1..20: mol_type = other DNA
tgctgtttctacttttatat

SEQ ID NO: 70957 - DNA, 20 bp, synthetic construct
  misc_feature 1..20: note = Description of Artificial Sequence: Synthetic oligonucleotide
  misc_feature 1..20: note = Target: SCN10A; (+) strand; PAM type: YTN; PAM sequence: TTT
  source 1..20: mol_type = other DNA
gctgtttctacttttatatt

SEQ ID NO: 70958 - DNA, 20 bp, synthetic construct
  misc_feature 1..20: note = Description of Artificial Sequence: Synthetic oligonucleotide
  misc_feature 1..20: note = Target: SCN10A; (+) strand; PAM type: YTN; PAM sequence: TTG
  source 1..20: mol_type = other DNA
ctgtttctacttttatattt

SEQ ID NO: 70959 - DNA, 20 bp, synthetic construct
  misc_feature 1..20: note = Description of Artificial Sequence: Synthetic oligonucleotide
  misc_feature 1..20: note = Target: SCN10A; (+) strand; PAM type: YTN; PAM sequence: CTG
  source 1..20: mol_type = other DNA
tttctacttttatattttgt

SEQ ID NO: 70960 - DNA, 20 bp, synthetic construct
  misc_feature 1..20: note = Description of Artificial Sequence: Synthetic oligonucleotide
  misc_feature 1..20: note = Target: SCN10A; (+) strand; PAM type: YTN; PAM sequence: TTT
  source 1..20: mol_type = other DNA
ctacttttatattttgtgtg

SEQ ID NO: 70961 - DNA, 20 bp, synthetic construct
  misc_feature 1..20: note = Description of Artificial Sequence: Synthetic oligonucleotide
  misc_feature 1..20: note = Target: SCN10A; (+) strand; PAM type: YTN; PAM sequence: TTC
  source 1..20: mol_type = other DNA
tacttttatattttgtgtgg

SEQ ID NO: 70962 - DNA, 20 bp, synthetic construct
  misc_feature 1..20: note = Description of Artificial Sequence: Synthetic oligonucleotide
  misc_feature 1..20: note = Target: SCN10A; (+) strand; PAM type: YTN; PAM sequence: CTA
  source 1..20: mol_type = other DNA
cttttatattttgtgtggct

SEQ ID NO: 70963 - DNA, 20 bp, synthetic construct
  misc_feature 1..20: note = Description of Artificial Sequence: Synthetic oligonucleotide
  misc_feature 1..20: note = Target: SCN10A; (+) strand; PAM type: YTN; PAM sequence: CTT
  source 1..20: mol_type = other DNA
ttatattttgtgtggcttcc

SEQ ID NO: 70964 - DNA, 20 bp, synthetic construct
  misc_feature 1..20: note = Description of Artificial Sequence: Synthetic oligonucleotide
  misc_feature 1..20: note = Target: SCN10A; (+) strand; PAM type: YTN; PAM sequence: TTT
  source 1..20: mol_type = other DNA
tatattttgtgtggcttcct

SEQ ID NO: 70965 - DNA, 20 bp, synthetic construct
  misc_feature 1..20: note = Description of Artificial Sequence: Synthetic oligonucleotide
  misc_feature 1..20: note = Target: SCN10A; (+) strand; PAM type: YTN; PAM sequence: TTT
  source 1..20: mol_type = other DNA
atattttgtgtggcttccta

SEQ ID NO: 70966 - DNA, 20 bp, synthetic construct
  misc_feature 1..20: note = Description of Artificial Sequence: Synthetic oligonucleotide
  misc_feature 1..20: note = Target: SCN10A; (+) strand; PAM type: YTN; PAM sequence: TTA
  source 1..20: mol_type = other DNA
tattttgtgtggcttcctaa

SEQ ID NO: 70967 - DNA, 20 bp, synthetic construct
  misc_feature 1..20: note = Description of Artificial Sequence: Synthetic oligonucleotide
  misc_feature 1..20: note = Target: SCN10A; (+) strand; PAM type: YTN; PAM sequence: TTT
  source 1..20: mol_type = other DNA
tgtgtggcttcctaaattta

SEQ ID NO: 70968 - DNA, 20 bp, synthetic construct
  misc_feature 1..20: note = Description of Artificial Sequence: Synthetic oligonucleotide
  misc_feature 1..20: note = Target: SCN10A; (+) strand; PAM type: YTN; PAM sequence: TTT
  source 1..20: mol_type = other DNA
gtgtggcttcctaaatttat

SEQ ID NO: 70969 - DNA, 20 bp, synthetic construct
  misc_feature 1..20: note = Description of Artificial Sequence: Synthetic oligonucleotide
  misc_feature 1..20: note = Target: SCN10A; (+) strand; PAM type: YTN; PAM sequence: TTG
  source 1..20: mol_type = other DNA
tgtggcttcctaaatttatt

SEQ ID NO: 70970 - DNA, 20 bp, synthetic construct
  misc_feature 1..20: note = Description of Artificial Sequence: Synthetic oligonucleotide
  misc_feature 1..20: note = Target: SCN10A; (+) strand; PAM type: YTN; PAM sequence: CTT
  source 1..20: mol_type = other DNA
cctaaatttatttacattcc

SEQ ID NO: 70971 - DNA, 20 bp, synthetic construct
  misc_feature 1..20: note = Description of Artificial Sequence: Synthetic oligonucleotide
  misc_feature 1..20: note = Target: SCN10A; (+) strand; PAM type: YTN; PAM sequence: TTC
  source 1..20: mol_type = other DNA
ctaaatttatttacattcca

SEQ ID NO: 70972 - DNA, 20 bp, synthetic construct
  misc_feature 1..20: note = Description of Artificial Sequence: Synthetic oligonucleotide
  misc_feature 1..20: note = Target: SCN10A; (+) strand; PAM type: YTN; PAM sequence: CTA
  source 1..20: mol_type = other DNA
aatttatttacattccaggt

SEQ ID NO: 70973 - DNA, 20 bp, synthetic construct
  misc_feature 1..20: note = Description of Artificial Sequence: Synthetic oligonucleotide
  misc_feature 1..20: note = Target: SCN10A; (+) strand; PAM type: YTN; PAM sequence: TTT
  source 1..20: mol_type = other DNA
atttacattccaggtaaggg

SEQ ID NO: 70974 - DNA, 20 bp, synthetic construct
  misc_feature 1..20: note = Description of Artificial Sequence: Synthetic oligonucleotide
  misc_feature 1..20: note = Target: SCN10A; (+) strand; PAM type: YTN; PAM sequence: TTA
  source 1..20: mol_type = other DNA
tttacattccaggtaagggt

SEQ ID NO: 70975 - DNA, 20 bp, synthetic construct
  misc_feature 1..20: note = Description of Artificial Sequence: Synthetic oligonucleotide
  misc_feature 1..20: note = Target: SCN10A; (+) strand; PAM type: YTN; PAM sequence: TTT
  source 1..20: mol_type = other DNA
acattccaggtaagggtaaa

SEQ ID NO: 70976 - DNA, 20 bp, synthetic construct
  misc_feature 1..20: note = Description of Artificial Sequence: Synthetic oligonucleotide
  misc_feature 1..20: note = Target: SCN10A; (+) strand; PAM type: YTN; PAM sequence: TTA
  source 1..20: mol_type = other DNA
cattccaggtaagggtaaat

SEQ ID NO: 70977 - DNA, 20 bp, synthetic construct
  misc_feature 1..20: note = Description of Artificial Sequence: Synthetic oligonucleotide
  misc_feature 1..20: note = Target: SCN10A; (+) strand; PAM type: YTN; PAM sequence: TTC
  source 1..20: mol_type = other DNA
caggtaagggtaaattcttc

SEQ ID NO: 70978 - DNA, 20 bp, synthetic construct
  misc_feature 1..20: note = Description of Artificial Sequence: Synthetic oligonucleotide
  misc_feature 1..20: note = Target: SCN10A; (+) strand; PAM type: YTN; PAM sequence: TTC
  source 1..20: mol_type = other DNA
ttctcctgtgatctggattt

SEQ ID NO: 70979 - DNA, 20 bp, synthetic construct
  misc_feature 1..20: note = Description of Artificial Sequence: Synthetic oligonucleotide
  misc_feature 1..20: note = Target: SCN10A; (+) strand; PAM type: YTN; PAM sequence: CTT
  source 1..20: mol_type = other DNA
ctcctgtgatctggattttc

SEQ ID NO: 70980 - DNA, 20 bp, synthetic construct
  misc_feature 1..20: note = Description of Artificial Sequence: Synthetic oligonucleotide
  misc_feature 1..20: note = Target: SCN10A; (+) strand; PAM type: YTN; PAM sequence: TTC
  source 1..20: mol_type = other DNA
tcctgtgatctggattttca

SEQ ID NO: 70981 - DNA, 20 bp, synthetic construct
  misc_feature 1..20: note = Description of Artificial Sequence: Synthetic oligonucleotide
  misc_feature 1..20: note = Target: SCN10A; (+) strand; PAM type: YTN; PAM sequence: CTC
  source 1..20: mol_type = other DNA
ctgtgatctggattttcaga

SEQ ID NO: 70982 - DNA, 20 bp, synthetic construct
  misc_feature 1..20: note = Description of Artificial Sequence: Synthetic oligonucleotide
  misc_feature 1..20: note = Target: SCN10A; (+) strand; PAM type: YTN; PAM sequence: CTG
  source 1..20: mol_type = other DNA
tgatctggattttcagatta

SEQ ID NO: 70983 - DNA, 20 bp, synthetic construct
  misc_feature 1..20: note = Description of Artificial Sequence: Synthetic oligonucleotide
  misc_feature 1..20: note = Target: SCN10A; (+) strand; PAM type: YTN; PAM sequence: CTG
  source 1..20: mol_type = other DNA
gattttcagattacccagtt

SEQ ID NO: 70984 - DNA, 20 bp, synthetic construct
  misc_feature 1..20: note = Description of Artificial Sequence: Synthetic oligonucleotide
  misc_feature 1..20: note = Target: SCN10A; (+) strand; PAM type: YTN; PAM sequence: TTT
  source 1..20: mol_type = other DNA
tcagattacccagttgggat

SEQ ID NO: 70985 - DNA, 20 bp, synthetic construct
  misc_feature 1..20: note = Description of Artificial Sequence: Synthetic oligonucleotide
  misc_feature 1..20: note = Target: SCN10A; (+) strand; PAM type: YTN; PAM sequence: TTT
  source 1..20: mol_type = other DNA
cagattacccagttgggatg

SEQ ID NO: 70986 - DNA, 20 bp, synthetic construct
  misc_feature 1..20: note = Description of Artificial Sequence: Synthetic oligonucleotide
  misc_feature 1..20: note = Target: SCN10A; (+) strand; PAM type: YTN; PAM sequence: TTC
  source 1..20: mol_type = other DNA
agattacccagttgggatgt

SEQ ID NO: 70987 - DNA, 20 bp, synthetic construct
  misc_feature 1..20: note = Description of Artificial Sequence: Synthetic oligonucleotide
  misc_feature 1..20: note = Target: SCN10A; (+) strand; PAM type: YTN; PAM sequence: TTA
  source 1..20: mol_type = other DNA
cccagttgggatgtatgttt

SEQ ID NO: 70988 - DNA, 20 bp, synthetic construct
  misc_feature 1..20: note = Description of Artificial Sequence: Synthetic oligonucleotide
  misc_feature 1..20: note = Target: SCN10A; (+) strand; PAM type: YTN; PAM sequence: TTG
  source 1..20: mol_type = other DNA
ggatgtatgtttggaggcag

SEQ ID NO: 70989 - DNA, 20 bp, synthetic construct
  misc_feature 1..20: note = Description of Artificial Sequence: Synthetic oligonucleotide
  misc_feature 1..20: note = Target: SCN10A; (+) strand; PAM type: YTN; PAM sequence: TTT
  source 1..20: mol_type = other DNA
ggaggcaggtttccccccct

SEQ ID NO: 70990 - DNA, 20 bp, synthetic construct
  misc_feature 1..20: note = Description of Artificial Sequence: Synthetic oligonucleotide
  misc_feature 1..20: note = Target: SCN10A; (+) strand; PAM type: YTN; PAM sequence: TTG
  source 1..20: mol_type = other DNA
gaggcaggtttccccccctc

SEQ ID NO: 70991 - DNA, 20 bp, synthetic construct
  misc_feature 1..20: note = Description of Artificial Sequence: Synthetic oligonucleotide
  misc_feature 1..20: note = Target: SCN10A; (+) strand; PAM type: YTN; PAM sequence: TTT
  source 1..20: mol_type = other DNA
ccccccctcacactttggga

SEQ ID NO: 70992 - DNA, 20 bp, synthetic construct
  misc_feature 1..20: note = Description of Artificial Sequence: Synthetic oligonucleotide
  misc_feature 1..20: note = Target: SCN10A; (+) strand; PAM type: YTN; PAM sequence: TTC
  source 1..20: mol_type = other DNA
cccccctcacactttgggag

SEQ ID NO: 70993 - DNA, 20 bp, synthetic construct
  misc_feature 1..20: note = Description of Artificial Sequence: Synthetic oligonucleotide
  misc_feature 1..20: note = Target: SCN10A; (+) strand; PAM type: YTN; PAM sequence: CTC
  source 1..20: mol_type = other DNA
acactttgggagctcacagt

SEQ ID NO: 70994 - DNA, 20 bp, synthetic construct
  misc_feature 1..20: note = Description of Artificial Sequence: Synthetic oligonucleotide
  misc_feature 1..20: note = Target: SCN10A; (+) strand; PAM type: YTN; PAM sequence: CTT
  source 1..20: mol_type = other DNA
tgggagctcacagtttttca

SEQ ID NO: 70995 - DNA, 20 bp, synthetic construct
  misc_feature 1..20: note = Description of Artificial Sequence: Synthetic oligonucleotide
  misc_feature 1..20: note = Target: SCN10A; (+) strand; PAM type: YTN; PAM sequence: TTT
  source 1..20: mol_type = other DNA
gggagctcacagtttttcac

SEQ ID NO: 70996 - DNA, 20 bp, synthetic construct
  misc_feature 1..20: note = Description of Artificial Sequence: Synthetic oligonucleotide
  misc_feature 1..20: note = Target: SCN10A; (+) strand; PAM type: YTN; PAM sequence: TTG
  source 1..20: mol_type = other DNA
ggagctcacagtttttcacc

SEQ ID NO: 70997 - DNA, 20 bp, synthetic construct
  misc_feature 1..20: note = Description of Artificial Sequence: Synthetic oligonucleotide
  misc_feature 1..20: note = Target: SCN10A; (+) strand; PAM type: YTN; PAM sequence: CTC
  source 1..20: mol_type = other DNA
acagtttttcacctgtcttg

SEQ ID NO: 70998 - DNA, 20 bp, synthetic construct
  misc_feature 1..20: note = Description of Artificial Sequence: Synthetic oligonucleotide
  misc_feature 1..20: note = Target: SCN10A; (+) strand; PAM type: YTN; PAM sequence: TTT
  source 1..20: mol_type = other DNA
ttcacctgtcttgcagaatt

SEQ ID NO: 70999 - DNA, 20 bp, synthetic construct
  misc_feature 1..20: note = Description of Artificial Sequence: Synthetic oligonucleotide
  misc_feature 1..20: note = Target: SCN10A; (+) strand; PAM type: YTN; PAM sequence: TTT
  source 1..20: mol_type = other DNA
tcacctgtcttgcagaattt

SEQ ID NO: 71000 - DNA, 20 bp, synthetic construct
  misc_feature 1..20: note = Description of Artificial Sequence: Synthetic oligonucleotide
  misc_feature 1..20: note = Target: SCN10A; (+) strand; PAM type: YTN; PAM sequence: TTT
  source 1..20: mol_type = other DNA
cacctgtcttgcagaatttc

SEQ ID NO: 71001 - DNA, 20 bp, synthetic construct
  misc_feature 1..20: note = Description of Artificial Sequence: Synthetic oligonucleotide
  misc_feature 1..20: note = Target: SCN10A; (+) strand; PAM type: YTN; PAM sequence: TTC
  source 1..20: mol_type = other DNA
acctgtcttgcagaatttcc

SEQ ID NO: 71002 - DNA, 20 bp, synthetic construct
  misc_feature 1..20: note = Description of Artificial Sequence: Synthetic oligonucleotide
  misc_feature 1..20: note = Target: SCN10A; (+) strand; PAM type: YTN; PAM sequence: CTG
  source 1..20: mol_type = other DNA
tcttgcagaatttccagcag

SEQ ID NO: 71003 - DNA, 20 bp, synthetic construct
  misc_feature 1..20: note = Description of Artificial Sequence: Synthetic oligonucleotide
  misc_feature 1..20: note = Target: SCN10A; (+) strand; PAM type: YTN; PAM sequence: CTT
  source 1..20: mol_type = other DNA
gcagaatttccagcagtgtg

SEQ ID NO: 71004 - DNA, 20 bp, synthetic construct
  misc_feature 1..20: note = Description of Artificial Sequence: Synthetic oligonucleotide
  misc_feature 1..20: note = Target: SCN10A; (+) strand; PAM type: YTN; PAM sequence: TTG
  source 1..20: mol_type = other DNA
cagaatttccagcagtgtgc

SEQ ID NO: 71005 - DNA, 20 bp, synthetic construct
  misc_feature 1..20: note = Description of Artificial Sequence: Synthetic oligonucleotide
  misc_feature 1..20: note = Target: SCN10A; (+) strand; PAM type: YTN; PAM sequence: TTT
  source 1..20: mol_type = other DNA
ccagcagtgtgccacttatt

SEQ ID NO: 71006 - DNA, 20 bp, synthetic construct
  misc_feature 1..20: note = Description of Artificial Sequence: Synthetic oligonucleotide
  misc_feature 1..20: note = Target: SCN10A; (+) strand; PAM type: YTN; PAM sequence: TTC
  source 1..20: mol_type = other DNA
cagcagtgtgccacttattt

SEQ ID NO: 71007 - DNA, 20 bp, synthetic construct
  misc_feature 1..20: note = Description of Artificial Sequence: Synthetic oligonucleotide
  misc_feature 1..20: note = Target: SCN10A; (+) strand; PAM type: YTN; PAM sequence: CTT
  source 1..20: mol_type = other DNA
atttaaaaggatctatgaat

SEQ ID NO: 71008 - DNA, 20 bp, synthetic construct
  misc_feature 1..20: note = Description of Artificial Sequence: Synthetic oligonucleotide
  misc_feature 1..20: note = Target: SCN10A; (+) strand; PAM type: YTN; PAM sequence: TTA
  source 1..20: mol_type = other DNA
tttaaaaggatctatgaatt

SEQ ID NO: 71009 - DNA, 20 bp, synthetic construct
  misc_feature 1..20: note = Description of Artificial Sequence: Synthetic oligonucleotide
  misc_feature 1..20: note = Target: SCN10A; (+) strand; PAM type: YTN; PAM sequence: TTT
  source 1..20: mol_type = other DNA
aaaaggatctatgaattctt

SEQ ID NO: 71010 - DNA, 20 bp, synthetic construct
  misc_feature 1..20: note = Description of Artificial Sequence: Synthetic oligonucleotide
  misc_feature 1..20: note = Target: SCN10A; (+) strand; PAM type: YTN; PAM sequence: TTA
  source 1..20: mol_type = other DNA
aaaggatctatgaattcttt

SEQ ID NO: 71011 - DNA, 20 bp, synthetic construct
  misc_feature 1..20: note = Description of Artificial Sequence: Synthetic oligonucleotide
  misc_feature 1..20: note = Target: SCN10A; (+) strand; PAM type: YTN; PAM sequence: CTA
  source 1..20: mol_type = other DNA
tgaattctttcagttctcct

SEQ ID NO: 71012 - DNA, 20 bp, synthetic construct
  misc_feature 1..20: note = Description of Artificial Sequence: Synthetic oligonucleotide
  misc_feature 1..20: note = Target: SCN10A; (+) strand; PAM type: YTN; PAM sequence: TTC
  source 1..20: mol_type = other DNA
tttcagttctcctggtatat

SEQ ID NO: 71013 - DNA, 20 bp, synthetic construct
  misc_feature 1..20: note = Description of Artificial Sequence: Synthetic oligonucleotide
  misc_feature 1..20: note = Target: SCN10A; (+) strand; PAM type: YTN; PAM sequence: CTT
  source 1..20: mol_type = other DNA
tcagttctcctggtatattc

SEQ ID NO: 71014 - DNA, 20 bp, synthetic construct
  misc_feature 1..20: note = Description of Artificial Sequence: Synthetic oligonucleotide
  misc_feature 1..20: note = Target: SCN10A; (+) strand; PAM type: YTN; PAM sequence: TTT
  source 1..20: mol_type = other DNA
cagttctcctggtatattcc

SEQ ID NO: 71015 - DNA, 20 bp, synthetic construct
  misc_feature 1..20: note = Description of Artificial Sequence: Synthetic oligonucleotide
  misc_feature 1..20: note = Target: SCN10A; (+) strand; PAM type: YTN; PAM sequence: TTC
  source 1..20: mol_type = other DNA
agttctcctggtatattcct

SEQ ID NO: 71016 - DNA, 20 bp, synthetic construct
  misc_feature 1..20: note = Description of Artificial Sequence: Synthetic oligonucleotide
  misc_feature 1..20: note = Target: SCN10A; (+) strand; PAM type: YTN; PAM sequence: TTC
  source 1..20: mol_type = other DNA
tcctggtatattcctgcagt

SEQ ID NO: 71017 - DNA, 20 bp, synthetic construct
  misc_feature 1..20: note = Description of Artificial Sequence: Synthetic oligonucleotide
  misc_feature 1..20: note = Target: SCN10A; (+) strand; PAM type: YTN; PAM sequence: CTC
  source 1..20: mol_type = other DNA
ctggtatattcctgcagtgg

SEQ ID NO: 71018 - DNA, 20 bp, synthetic construct
  misc_feature 1..20: note = Description of Artificial Sequence: Synthetic oligonucleotide
  misc_feature 1..20: note = Target: SCN10A; (+) strand; PAM type: YTN; PAM sequence: CTG
  source 1..20: mol_type = other DNA
gtatattcctgcagtggttc

SEQ ID NO: 71019 - DNA, 20 bp, synthetic construct
  misc_feature 1..20: note = Description of Artificial Sequence: Synthetic oligonucleotide
  misc_feature 1..20: note = Target: SCN10A; (+) strand; PAM type: YTN; PAM sequence: TTC
  source 1..20: mol_type = other DNA
ctgcagtggttcttggagca

SEQ ID NO: 71020 - DNA, 20 bp, synthetic construct
  misc_feature 1..20: note = Description of Artificial Sequence: Synthetic oligonucleotide
  misc_feature 1..20: note = Target: SCN10A; (+) strand; PAM type: YTN; PAM sequence: CTG
  source 1..20: mol_type = other DNA
cagtggttcttggagcaaac

SEQ ID NO: 71021 - DNA, 20 bp, synthetic construct
  misc_feature 1..20: note = Description of Artificial Sequence: Synthetic oligonucleotide
  misc_feature 1..20: note = Target: SCN10A; (+) strand; PAM type: YTN; PAM sequence: TTC
  source 1..20: mol_type = other DNA
ttggagcaaacgttcatggt

SEQ ID NO: 71022 - DNA, 20 bp, synthetic construct
  misc_feature 1..20: note = Description of Artificial Sequence: Synthetic oligonucleotide
  misc_feature 1..20: note = Target: SCN10A; (+) strand; PAM type: YTN; PAM sequence: CTT
  source 1..20: mol_type = other DNA
ggagcaaacgttcatggtgt

SEQ ID NO: 71023 - DNA, 20 bp, synthetic construct
  misc_feature 1..20: note = Description of Artificial Sequence: Synthetic oligonucleotide
  misc_feature 1..20: note = Target: SCN10A; (+) strand; PAM type: YTN; PAM sequence: TTG
  source 1..20: mol_type = other DNA
gagcaaacgttcatggtgtg

SEQ ID NO: 71024 - DNA, 20 bp, synthetic construct
  misc_feature 1..20: note = Description of Artificial Sequence: Synthetic oligonucleotide
  misc_feature 1..20: note = Target: SCN10A; (+) strand; PAM type: YTN; PAM sequence: TTC
  source 1..20: mol_type = other DNA
atggtgtgagtctccacact

SEQ ID NO: 71025 - DNA, 20 bp, synthetic construct
  misc_feature 1..20: note = Description of Artificial Sequence: Synthetic oligonucleotide
  misc_feature 1..20: note = Target: SCN10A; (+) strand; PAM type: YTN; PAM sequence: CTC
  source 1..20: mol_type = other DNA
cacactctgtccaagtggga

SEQ ID NO: 71026 - DNA, 20 bp, synthetic construct
  misc_feature 1..20: note = Description of Artificial Sequence: Synthetic oligonucleotide
  misc_feature 1..20: note = Target: SCN10A; (+) strand; PAM type: YTN; PAM sequence: CTC
  source 1..20: mol_type = other DNA
tgtccaagtgggacctgcat

SEQ ID NO: 71027 - DNA, 20 bp, synthetic construct
  misc_feature 1..20: note = Description of Artificial Sequence: Synthetic oligonucleotide
  misc_feature 1..20: note = Target: SCN10A; (+) strand; PAM type: YTN; PAM sequence: CTG
  source 1..20: mol_type = other DNA
tccaagtgggacctgcatgt

SEQ ID NO: 71028 - DNA, 20 bp, synthetic construct
  misc_feature 1..20: note = Description of Artificial Sequence: Synthetic oligonucleotide
  misc_feature 1..20: note = Target: SCN10A; (+) strand; PAM type: YTN; PAM sequence: CTG
  source 1..20: mol_type = other DNA
catgttagccctgtctccta

SEQ ID NO: 71029 - DNA, 20 bp, synthetic construct
  misc_feature 1..20: note = Description of Artificial Sequence: Synthetic oligonucleotide
  misc_feature 1..20: note = Target: SCN10A; (+) strand; PAM type: YTN; PAM sequence: TTA
  source 1..20: mol_type = other DNA
gccctgtctcctacccacca

SEQ ID NO: 71030 - DNA, 20 bp, synthetic construct
  misc_feature 1..20: note = Description of Artificial Sequence: Synthetic oligonucleotide
  misc_feature 1..20: note = Target: SCN10A; (+) strand; PAM type: YTN; PAM sequence: CTG
  source 1..20: mol_type = other DNA
tctcctacccaccattttgt

SEQ ID NO: 71031 - DNA, 20 bp, synthetic construct
  misc_feature 1..20: note = Description of Artificial Sequence: Synthetic oligonucleotide
  misc_feature 1..20: note = Target: SCN10A; (+) strand; PAM type: YTN; PAM sequence: CTC
  source 1..20: mol_type = other DNA
ctacccaccattttgtcccc

SEQ ID NO: 71032 - DNA, 20 bp, synthetic construct
  misc_feature 1..20: note = Description of Artificial Sequence: Synthetic oligonucleotide
  misc_feature 1..20: note = Target: SCN10A; (+) strand; PAM type: YTN; PAM sequence: CTA
  source 1..20: mol_type = other DNA
cccaccattttgtcccctct

SEQ ID NO: 71033 - DNA, 20 bp, synthetic construct
  misc_feature 1..20: note = Description of Artificial Sequence: Synthetic oligonucleotide
  misc_feature 1..20: note = Target: SCN10A; (+) strand; PAM type: YTN; PAM sequence: TTT
  source 1..20: mol_type = other DNA
tgtcccctctcctatcacac

SEQ ID NO: 71034 - DNA, 20 bp, synthetic construct
  misc_feature 1..20: note = Description of Artificial Sequence: Synthetic oligonucleotide
  misc_feature 1..20: note = Target: SCN10A; (+) strand; PAM type: YTN; PAM sequence: TTT
  source 1..20: mol_type = other DNA
gtcccctctcctatcacaca

SEQ ID NO: 71035 - DNA, 20 bp, synthetic construct
  misc_feature 1..20: note = Description of Artificial Sequence: Synthetic oligonucleotide
  misc_feature 1..20: note = Target: SCN10A; (+) strand; PAM type: YTN; PAM sequence: TTG
  source 1..20: mol_type = other DNA
tcccctctcctatcacacat

SEQ ID NO: 71036 - DNA, 20 bp, synthetic construct
  misc_feature 1..20: note = Description of Artificial Sequence: Synthetic oligonucleotide
  misc_feature 1..20: note = Target: SCN10A; (+) strand; PAM type: YTN; PAM sequence: CTC
  source 1..20: mol_type = other DNA
tcctatcacacatgcagatc

SEQ ID NO: 71037 - DNA, 20 bp, synthetic construct
  misc_feature 1..20: note = Description of Artificial Sequence: Synthetic oligonucleotide
  misc_feature 1..20: note = Target: SCN10A; (+) strand; PAM type: YTN; PAM sequence: CTC
  source 1..20: mol_type = other DNA
ctatcacacatgcagatctg

SEQ ID NO: 71038 - DNA, 20 bp, synthetic construct
  misc_feature 1..20: note = Description of Artificial Sequence: Synthetic oligonucleotide
  misc_feature 1..20: note = Target: SCN10A; (+) strand; PAM type: YTN; PAM sequence: CTA
  source 1..20: mol_type = other DNA
tcacacatgcagatctgcat

SEQ ID NO: 71039 - DNA, 20 bp, synthetic construct
  misc_feature 1..20: note = Description of Artificial Sequence: Synthetic oligonucleotide
  misc_feature 1..20: note = Target: SCN10A; (+) strand; PAM type: YTN; PAM sequence: CTG
  source 1..20: mol_type = other DNA
catagagatatactcacgcc

SEQ ID NO: 71040 - DNA, 20 bp, synthetic construct
  misc_feature 1..20: note = Description of Artificial Sequence: Synthetic oligonucleotide
  misc_feature 1..20: note = Target: SCN10A; (+) strand; PAM type: YTN; PAM sequence: CTC
  source 1..20: mol_type = other DNA
acgccagggtaatgacgcta

SEQ ID NO: 71041 - DNA, 20 bp, synthetic construct
  misc_feature 1..20: note = Description of Artificial Sequence: Synthetic oligonucleotide
  misc_feature 1..20: note = Target: SCN10A; (+) strand; PAM type: YTN; PAM sequence: CTA
  source 1..20: mol_type = other DNA
aaatccagccagttccaagg

SEQ ID NO: 71042 - DNA, 20 bp, synthetic construct
  misc_feature 1..20: note = Description of Artificial Sequence: Synthetic oligonucleotide
  misc_feature 1..20: note = Target: SCN10A; (+) strand; PAM type: YTN; PAM sequence: TTC
  source 1..20: mol_type = other DNA
caaggatctctcaggtacgt

SEQ ID NO: 71043 - DNA, 20 bp, synthetic construct
  misc_feature 1..20: note = Description of Artificial Sequence: Synthetic oligonucleotide
  misc_feature 1..20: note = Target: SCN10A; (+) strand; PAM type: YTN; PAM sequence: CTC
  source 1..20: mol_type = other DNA
tcaggtacgtgaactcattt

SEQ ID NO: 71044 - DNA, 20 bp, synthetic construct
  misc_feature 1..20: note = Description of Artificial Sequence: Synthetic oligonucleotide
  misc_feature 1..20: note = Target: SCN10A; (+) strand; PAM type: YTN; PAM sequence: CTC
  source 1..20: mol_type = other DNA
aggtacgtgaactcatttag

SEQ ID NO: 71045 - DNA, 20 bp, synthetic construct
  misc_feature 1..20: note = Description of Artificial Sequence: Synthetic oligonucleotide
  misc_feature 1..20: note = Target: SCN10A; (+) strand; PAM type: YTN; PAM sequence: CTC
  source 1..20: mol_type = other DNA
atttagacaaaatcctcttg

SEQ ID NO: 71046 - DNA, 20 bp, synthetic construct
  misc_feature 1..20: note = Description of Artificial Sequence: Synthetic oligonucleotide
  misc_feature 1..20: note = Target: SCN10A; (+) strand; PAM type: YTN; PAM sequence: TTT
  source 1..20: mol_type = other DNA
agacaaaatcctcttgccag

SEQ ID NO: 71047 - DNA, 20 bp, synthetic construct
  misc_feature 1..20: note = Description of Artificial Sequence: Synthetic oligonucleotide
  misc_feature 1..20: note = Target: SCN10A; (+) strand; PAM type: YTN; PAM sequence: TTA
  source 1..20: mol_type = other DNA
gacaaaatcctcttgccagt

SEQ ID NO: 71048 - DNA, 20 bp, synthetic construct
  misc_feature 1..20: note = Description of Artificial Sequence: Synthetic oligonucleotide
  misc_feature 1..20: note = Target: SCN10A; (+) strand; PAM type: YTN; PAM sequence: CTC
  source 1..20: mol_type = other DNA
ttgccagtatctttatcaag

SEQ ID NO: 71049 - DNA, 20 bp, synthetic construct
  misc_feature 1..20: note = Description of Artificial Sequence: Synthetic oligonucleotide
  misc_feature 1..20: note = Target: SCN10A; (+) strand; PAM type: YTN; PAM sequence: CTT
  source 1..20: mol_type = other DNA
gccagtatctttatcaaggc

SEQ ID NO: 71050 - DNA, 20 bp, synthetic construct
  misc_feature 1..20: note = Description of Artificial Sequence: Synthetic oligonucleotide
  misc_feature 1..20: note = Target: SCN10A; (+) strand; PAM type: YTN; PAM sequence: TTG
  source 1..20: mol_type = other DNA
ccagtatctttatcaaggct

SEQ ID NO: 71051 - DNA, 20 bp, synthetic construct
  misc_feature 1..20: note = Description of Artificial Sequence: Synthetic oligonucleotide
  misc_feature 1..20: note = Target: SCN10A; (+) strand; PAM type: YTN; PAM sequence: CTT
  source 1..20: mol_type = other DNA
tatcaaggcttcaaaggtgt

SEQ ID NO: 71052 - DNA, 20 bp, synthetic construct
  misc_feature 1..20: note = Description of Artificial Sequence: Synthetic oligonucleotide
  misc_feature 1..20: note = Target: SCN10A; (+) strand; PAM type: YTN; PAM sequence: TTT
  source 1..20: mol_type = other DNA
atcaaggcttcaaaggtgta

SEQ ID NO: 71053 - DNA, 20 bp, synthetic construct
  misc_feature 1..20: note = Description of Artificial Sequence: Synthetic oligonucleotide
  misc_feature 1..20: note = Target: SCN10A; (+) strand; PAM type: YTN; PAM sequence: TTA
  source 1..20: mol_type = other DNA
tcaaggcttcaaaggtgtaa

SEQ ID NO: 71054 - DNA, 20 bp, synthetic construct
  misc_feature 1..20: note = Description of Artificial Sequence: Synthetic oligonucleotide
  misc_feature 1..20: note = Target: SCN10A; (+) strand; PAM type: YTN; PAM sequence: CTT
  source 1..20: mol_type = other DNA
caaaggtgtaaatgacagtg

SEQ ID NO: 71055 - DNA, 20 bp, synthetic construct
  misc_feature 1..20: note = Description of Artificial Sequence: Synthetic oligonucleotide
  misc_feature 1..20: note = Target: SCN10A; (+) strand; PAM type: YTN; PAM sequence: TTC
  source 1..20: mol_type = other DNA
aaaggtgtaaatgacagtga

SEQ ID NO: 71056 - DNA, 20 bp, synthetic construct
  misc_feature 1..20: note = Description of Artificial Sequence: Synthetic oligonucleotide
  misc_feature 1..20: note = Target: SCN10A; (+) strand; PAM type: YTN; PAM sequence: CTG
  source 1..20: mol_type = other DNA
ggaaggagggtagaaaagga

SEQ ID NO: 71057 - DNA, 20 bp, synthetic construct
  misc_feature 1..20: note = Description of Artificial Sequence: Synthetic oligonucleotide
  misc_feature 1..20: note = Target: SCN10A; (+) strand; PAM type: YTN; PAM sequence: CTG
  source 1..20: mol_type = other DNA
tgccatggagtgtactcagg

SEQ ID NO: 71058 - DNA, 20 bp, synthetic construct
  misc_feature 1..20: note = Description of Artificial Sequence: Synthetic oligonucleotide
  misc_feature 1..20: note = Target: SCN10A; (+) strand; PAM type: YTN; PAM sequence: CTC
  source 1..20: mol_type = other DNA
agggggttccttcttccagg

SEQ ID NO: 71059 - DNA, 20 bp, synthetic construct
  misc_feature 1..20: note = Description of Artificial Sequence: Synthetic oligonucleotide
  misc_feature 1..20: note = Target: SCN10A; (+) strand; PAM type: YTN; PAM sequence: TTC
  source 1..20: mol_type = other DNA
cttcttccaggagggaggga

SEQ ID NO: 71060 - DNA, 20 bp, synthetic construct
  misc_feature 1..20: note = Description of Artificial Sequence: Synthetic oligonucleotide
  misc_feature 1..20: note = Target: SCN10A; (+) strand; PAM type: YTN; PAM sequence: CTT
  source 1..20: mol_type = other DNA
cttccaggagggagggatga

SEQ ID NO: 71061 - DNA, 20 bp, synthetic construct
  misc_feature 1..20: note = Description of Artificial Sequence: Synthetic oligonucleotide
  misc_feature 1..20: note = Target: SCN10A; (+) strand; PAM type: YTN; PAM sequence: TTC
  source 1..20: mol_type = other DNA
ttccaggagggagggatgac

SEQ ID NO: 71062 - DNA, 20 bp, synthetic construct
  misc_feature 1..20: note = Description of Artificial Sequence: Synthetic oligonucleotide
  misc_feature 1..20: note = Target: SCN10A; (+) strand; PAM type: YTN; PAM sequence: CTT
  source 1..20: mol_type = other DNA
ccaggagggagggatgacct

SEQ ID NO: 71063 - DNA, 20 bp, synthetic construct
  misc_feature 1..20: note = Description of Artificial Sequence: Synthetic oligonucleotide
  misc_feature 1..20: note = Target: SCN10A; (+) strand; PAM type: YTN; PAM sequence: TTC
  source 1..20: mol_type = other DNA
caggagggagggatgacctg

SEQ ID NO: 71064 - DNA, 20 bp, synthetic construct
  misc_feature 1..20: note = Description of Artificial Sequence: Synthetic oligonucleotide
  misc_feature 1..20: note = Target: SCN10A; (+) strand; PAM type: YTN; PAM sequence: CTG
  source 1..20: mol_type = other DNA
ctctgactgctccaagaaaa

SEQ ID NO: 71065 - DNA, 20 bp, synthetic construct
  misc_feature 1..20: note = Description of Artificial Sequence: Synthetic oligonucleotide
  misc_feature 1..20: note = Target: SCN10A; (+) strand; PAM type: YTN; PAM sequence: CTC
  source 1..20: mol_type = other DNA
tgactgctccaagaaaaaac

SEQ ID NO: 71066 - DNA, 20 bp, synthetic construct
  misc_feature 1..20: note = Description of Artificial Sequence: Synthetic oligonucleotide
  misc_feature 1..20: note = Target: SCN10A; (+) strand; PAM type: YTN; PAM sequence: CTG
  source 1..20: mol_type = other DNA
actgctccaagaaaaaacat

SEQ ID NO: 71067 - DNA, 20 bp, synthetic construct
  misc_feature 1..20: note = Description of Artificial Sequence: Synthetic oligonucleotide
  misc_feature 1..20: note = Target: SCN10A; (+) strand; PAM type: YTN; PAM sequence: CTG
  source 1..20: mol_type = other DNA
ctccaagaaaaaacatgcaa

SEQ ID NO: 71068 - DNA, 20 bp, synthetic construct
  misc_feature 1..20: note = Description of Artificial Sequence: Synthetic oligonucleotide
  misc_feature 1..20: note = Target: SCN10A; (+) strand; PAM type: YTN; PAM sequence: CTC
  source 1..20: mol_type = other DNA
caagaaaaaacatgcaaaga

SEQ ID NO: 71069 - DNA, 20 bp, synthetic construct
  misc_feature 1..20: note = Description of Artificial Sequence: Synthetic oligonucleotide
  misc_feature 1..20: note = Target: SCN10A; (+) strand; PAM type: YTN; PAM sequence: CTG
  source 1..20: mol_type = other DNA
agggaaaaagaagggccaca

SEQ ID NO: 71070 - DNA, 20 bp, synthetic construct
  misc_feature 1..20: note = Description of Artificial Sequence: Synthetic oligonucleotide
  misc_feature 1..20: note = Target: SCN10A; (+) strand; PAM type: YTN; PAM sequence: CTG
  source 1..20: mol_type = other DNA
ggacagccagcagcttctgc

SEQ ID NO: 71071 - DNA, 20 bp, synthetic construct
  misc_feature 1..20: note = Description of Artificial Sequence: Synthetic oligonucleotide
  misc_feature 1..20: note = Target: SCN10A; (+) strand; PAM type: YTN; PAM sequence: CTT
  source 1..20: mol_type = other DNA
ctgctgttctggggttaggc

SEQ ID NO: 71072 - DNA, 20 bp, synthetic construct
  misc_feature 1..20: note = Description of Artificial Sequence: Synthetic oligonucleotide
  misc_feature 1..20: note = Target: SCN10A; (+) strand; PAM type: YTN; PAM sequence: TTC
  source 1..20: mol_type = other DNA
tgctgttctggggttaggca

SEQ ID NO: 71073 - DNA, 20 bp, synthetic construct
  misc_feature 1..20: note = Description of Artificial Sequence: Synthetic oligonucleotide
  misc_feature 1..20: note = Target: SCN10A; (+) strand; PAM type: YTN; PAM sequence: CTG
  source 1..20: mol_type = other DNA
ctgttctggggttaggcaga

SEQ ID NO: 71074 - DNA, 20 bp, synthetic construct
  misc_feature 1..20: note = Description of Artificial Sequence: Synthetic oligonucleotide
  misc_feature 1..20: note = Target: SCN10A; (+) strand; PAM type: YTN; PAM sequence: CTG
  source 1..20: mol_type = other DNA
ttctggggttaggcagaggg

SEQ ID NO: 71075 - DNA, 20 bp, synthetic construct
  misc_feature 1..20: note = Description of Artificial Sequence: Synthetic oligonucleotide
  misc_feature 1..20: note = Target: SCN10A; (+) strand; PAM type: YTN; PAM sequence: TTC
  source 1..20: mol_type = other DNA
tggggttaggcagagggcag

SEQ ID NO: 71076 - DNA, 20 bp, synthetic construct
  misc_feature 1..20: note = Description of Artificial Sequence: Synthetic oligonucleotide
  misc_feature 1..20: note = Target: SCN10A; (+) strand; PAM type: YTN; PAM sequence: CTG
  source 1..20: mol_type = other DNA
gggttaggcagagggcagta

SEQ ID NO: 71077 - DNA, 20 bp, synthetic construct
  misc_feature 1..20: note = Description of Artificial Sequence: Synthetic oligonucleotide
  misc_feature 1..20: note = Target: SCN10A; (+) strand; PAM type: YTN; PAM sequence: TTA
  source 1..20: mol_type = other DNA
ggcagagggcagtagcgggt

SEQ ID NO: 71078 - DNA, 20 bp, synthetic construct
  misc_feature 1..20: note = Description of Artificial Sequence: Synthetic oligonucleotide
  misc_feature 1..20: note = Target: SCN10A; (+) strand; PAM type: YTN; PAM sequence: TTC
  source 1..20: mol_type = other DNA
tcctgtttatgtctgccagg

SEQ ID NO: 71079 - DNA, 20 bp, synthetic construct
  misc_feature 1..20: note = Description of Artificial Sequence: Synthetic oligonucleotide
  misc_feature 1..20: note = Target: SCN10A; (+) strand; PAM type: YTN; PAM sequence: CTC
  source 1..20: mol_type = other DNA
ctgtttatgtctgccagggc

SEQ ID NO: 71080 - DNA, 20 bp, synthetic construct
  misc_feature 1..20: note = Description of Artificial Sequence: Synthetic oligonucleotide
  misc_feature 1..20: note = Target: SCN10A; (+) strand; PAM type: YTN; PAM sequence: CTG
  source 1..20: mol_type = other DNA
tttatgtctgccagggcctc

SEQ ID NO: 71081 - DNA, 20 bp, synthetic construct
  misc_feature 1..20: note = Description of Artificial Sequence: Synthetic oligonucleotide
  misc_feature 1..20: note = Target: SCN10A; (+) strand; PAM type: YTN; PAM sequence: TTT
  source 1..20: mol_type = other DNA
atgtctgccagggcctccct

SEQ ID NO: 71082 - DNA, 20 bp, synthetic construct
  misc_feature 1..20: note = Description of Artificial Sequence: Synthetic oligonucleotide
  misc_feature 1..20: note = Target: SCN10A; (+) strand; PAM type: YTN; PAM sequence: TTA
  source 1..20: mol_type = other DNA
tgtctgccagggcctcccta

SEQ ID NO: 71083 - DNA, 20 bp, synthetic construct
  misc_feature 1..20: note = Description of Artificial Sequence: Synthetic oligonucleotide
  misc_feature 1..20: note = Target: SCN10A; (+) strand; PAM type: YTN; PAM sequence: CTG
  source 1..20: mol_type = other DNA
ccagggcctccctatcctgc

SEQ ID NO: 71084 - DNA, 20 bp, synthetic construct
  misc_feature 1..20: note = Description of Artificial Sequence: Synthetic oligonucleotide
  misc_feature 1..20: note = Target: SCN10A; (+) strand; PAM type: YTN; PAM sequence: CTC
  source 1..20: mol_type = other DNA
cctatcctgcaagaagctgg

SEQ ID NO: 71085 - DNA, 20 bp, synthetic construct
  misc_feature 1..20: note = Description of Artificial Sequence: Synthetic oligonucleotide
  misc_feature 1..20: note = Target: SCN10A; (+) strand; PAM type: YTN; PAM sequence: CTA
  source 1..20: mol_type = other DNA
tcctgcaagaagctggaggc

SEQ ID NO: 71086 - DNA, 20 bp, synthetic construct
  misc_feature 1..20: note = Description of Artificial Sequence: Synthetic oligonucleotide
  misc_feature 1..20: note = Target: SCN10A; (+) strand; PAM type: YTN; PAM sequence: CTG
  source 1..20: mol_type = other DNA
caagaagctggaggctcatc

SEQ ID NO: 71087 - DNA, 20 bp, synthetic construct
  misc_feature 1..20: note = Description of Artificial Sequence: Synthetic oligonucleotide
  misc_feature 1..20: note = Target: SCN10A; (+) strand; PAM type: YTN; PAM sequence: CTG
  source 1..20: mol_type = other DNA
gaggctcatctaaaaactcc

SEQ ID NO: 71088 - DNA, 20 bp, synthetic construct
  misc_feature 1..20: note = Description of Artificial Sequence: Synthetic oligonucleotide
  misc_feature 1..20: note = Target: SCN10A; (+) strand; PAM type: YTN; PAM sequence: CTC
  source 1..20: mol_type = other DNA
atctaaaaactcccagtttt

SEQ ID NO: 71089 - DNA, 20 bp, synthetic construct
  misc_feature 1..20: note = Description of Artificial Sequence: Synthetic oligonucleotide
  misc_feature 1..20: note = Target: SCN10A; (+) strand; PAM type: YTN; PAM sequence: CTA
  source 1..20: mol_type = other DNA
aaaactcccagtttttagaa

SEQ ID NO: 71090 - DNA, 20 bp, synthetic construct
  misc_feature 1..20: note = Description of Artificial Sequence: Synthetic oligonucleotide
  misc_feature 1..20: note = Target: SCN10A; (+) strand; PAM type: YTN; PAM sequence: CTC
  source 1..20: mol_type = other DNA
ccagtttttagaaactggag

SEQ ID NO: 71091 - DNA, 20 bp, synthetic construct
  misc_feature 1..20: note = Description of Artificial Sequence: Synthetic oligonucleotide
  misc_feature 1..20: note = Target: SCN10A; (+) strand; PAM type: YTN; PAM sequence: TTT
  source 1..20: mol_type = other DNA
ttagaaactggagtgcagac

SEQ ID NO: 71092 - DNA, 20 bp, synthetic construct
  misc_feature 1..20: note = Description of Artificial Sequence: Synthetic oligonucleotide
  misc_feature 1..20: note = Target: SCN10A; (+) strand; PAM type: YTN; PAM sequence: TTT
  source 1..20: mol_type = other DNA
tagaaactggagtgcagact

SEQ ID NO: 71093 - DNA, 20 bp, synthetic construct
  misc_feature 1..20: note = Description of Artificial Sequence: Synthetic oligonucleotide
  misc_feature 1..20: note = Target: SCN10A; (+) strand; PAM type: YTN; PAM sequence: TTT
  source 1..20: mol_type = other DNA
agaaactggagtgcagactg

SEQ ID NO: 71094 - DNA, 20 bp, synthetic construct
  misc_feature 1..20: note = Description of Artificial Sequence: Synthetic oligonucleotide
  misc_feature 1..20: note = Target: SCN10A; (+) strand; PAM type: YTN; PAM sequence: TTA
  source 1..20: mol_type = other DNA
gaaactggagtgcagactga

SEQ ID NO: 71095 - DNA, 20 bp, synthetic construct
  misc_feature 1..20: note = Description of Artificial Sequence: Synthetic oligonucleotide
  misc_feature 1..20: note = Target: SCN10A; (+) strand; PAM type: YTN; PAM sequence: CTG
  source 1..20: mol_type = other DNA
gagtgcagactgatgagtgg

SEQ ID NO: 71096 - DNA, 20 bp, synthetic construct
  misc_feature 1..20: note = Description of Artificial Sequence: Synthetic oligonucleotide
  misc_feature 1..20: note = Target: SCN10A; (+) strand; PAM type: YTN; PAM sequence: CTG
  source 1..20: mol_type = other DNA
atgagtggtaactgacagag

SEQ ID NO: 71097 - DNA, 20 bp, synthetic construct
  misc_feature 1..20: note = Description of Artificial Sequence: Synthetic oligonucleotide
  misc_feature 1..20: note = Target: SCN10A; (+) strand; PAM type: YTN; PAM sequence: CTG
  source 1..20: mol_type = other DNA
acagagcagacctaagaaag

SEQ ID NO: 71098 - DNA, 20 bp, synthetic construct
  misc_feature 1..20: note = Description of Artificial Sequence: Synthetic oligonucleotide
  misc_feature 1..20: note = Target: SCN10A; (+) strand; PAM type: YTN; PAM sequence: CTA
  source 1..20: mol_type = other DNA
agaaagctgaaaactggctg

SEQ ID NO: 71099 - DNA, 20 bp, synthetic construct
  misc_feature 1..20: note = Description of Artificial Sequence: Synthetic oligonucleotide
  misc_feature 1..20: note = Target: SCN10A; (+) strand; PAM type: YTN; PAM sequence: CTG
  source 1..20: mol_type = other DNA
aaaactggctgaagcaggga

SEQ ID NO: 71100 - DNA, 20 bp, synthetic construct
  misc_feature 1..20: note = Description of Artificial Sequence: Synthetic oligonucleotide
  misc_feature 1..20: note = Target: SCN10A; (+) strand; PAM type: YTN; PAM sequence: CTG
  source 1..20: mol_type = other DNA
gctgaagcagggaataccca

SEQ ID NO: 71101 - DNA, 20 bp, synthetic construct
  misc_feature 1..20: note = Description of Artificial Sequence: Synthetic oligonucleotide
  misc_feature 1..20: note = Target: SCN10A; (+) strand; PAM type: YTN; PAM sequence: CTG
  source 1..20: mol_type = other DNA
aagcagggaatacccagaag

SEQ ID NO: 71102 - DNA, 20 bp, synthetic construct
  misc_feature 1..20: note = Description of Artificial Sequence: Synthetic oligonucleotide
  misc_feature 1..20: note = Target: SCN10A; (+) strand; PAM type: YTN; PAM sequence: CTA
  source 1..20: mol_type = other DNA
tgctgcagagccccagaact

SEQ ID NO: 71103 - DNA, 20 bp, synthetic construct
  misc_feature 1..20: note = Description of Artificial Sequence: Synthetic oligonucleotide
  misc_feature 1..20: note = Target: SCN10A; (+) strand; PAM type: YTN; PAM sequence: CTG
  source 1..20: mol_type = other DNA
cagagccccagaactgcttg

SEQ ID NO: 71104 - DNA, 20 bp, synthetic construct
  misc_feature 1..20: note = Description of Artificial Sequence: Synthetic oligonucleotide
  misc_feature 1..20: note = Target: SCN10A; (+) strand; PAM type: YTN; PAM sequence: CTG
  source 1..20: mol_type = other DNA
cttggaacttagagatgcta

SEQ ID NO: 71105 - DNA, 20 bp, synthetic construct
  misc_feature 1..20: note = Description of Artificial Sequence: Synthetic oligonucleotide
  misc_feature 1..20: note = Target: SCN10A; (+) strand; PAM type: YTN; PAM sequence: CTT
  source 1..20: mol_type = other DNA
ggaacttagagatgctaagt

SEQ ID NO: 71106 - DNA, 20 bp, synthetic construct
  misc_feature 1..20: note = Description of Artificial Sequence: Synthetic oligonucleotide
  misc_feature 1..20: note = Target: SCN10A; (+) strand; PAM type: YTN; PAM sequence: TTG
  source 1..20: mol_type = other DNA
gaacttagagatgctaagta

SEQ ID NO: 71107 - DNA, 20 bp, synthetic construct
  misc_feature 1..20: note = Description of Artificial Sequence: Synthetic oligonucleotide
  misc_feature 1..20: note = Target: SCN10A; (+) strand; PAM type: YTN; PAM sequence: CTT
  source 1..20: mol_type = other DNA
agagatgctaagtatctctg

SEQ ID NO: 71108 - DNA, 20 bp, synthetic construct
  misc_feature 1..20: note = Description of Artificial Sequence: Synthetic oligonucleotide
  misc_feature 1..20: note = Target: SCN10A; (+) strand; PAM type: YTN; PAM sequence: TTA
  source 1..20: mol_type = other DNA
gagatgctaagtatctctga

SEQ ID NO: 71109 - DNA, 20 bp, synthetic construct
  misc_feature 1..20: note = Description of Artificial Sequence: Synthetic oligonucleotide
  misc_feature 1..20: note = Target: SCN10A; (+) strand; PAM type: YTN; PAM sequence: CTA
  source 1..20: mol_type = other DNA
agtatctctgaaagcaaggt

SEQ ID NO: 71110 - DNA, 20 bp, synthetic construct
  misc_feature 1..20: note = Description of Artificial Sequence: Synthetic oligonucleotide
  misc_feature 1..20: note = Target: SCN10A; (+) strand; PAM type: YTN; PAM sequence: CTC
  source 1..20: mol_type = other DNA
tgaaagcaaggtttggggga

SEQ ID NO: 71111 - DNA, 20 bp, synthetic construct
  misc_feature 1..20: note = Description of Artificial Sequence: Synthetic oligonucleotide
  misc_feature 1..20: note = Target: SCN10A; (+) strand; PAM type: YTN; PAM sequence: CTG
  source 1..20: mol_type = other DNA
aaagcaaggtttgggggagg

SEQ ID NO: 71112 - DNA, 20 bp, synthetic construct
  misc_feature 1..20: note = Description of Artificial Sequence: Synthetic oligonucleotide
  misc_feature 1..20: note = Target: SCN10A; (+) strand; PAM type: YTN; PAM sequence: TTT
  source 1..20: mol_type = other DNA
gggggagggtgataagtagg

SEQ ID NO: 71113 - DNA, 20 bp, synthetic construct
  misc_feature 1..20: note = Description of Artificial Sequence: Synthetic oligonucleotide
  misc_feature 1..20: note = Target: SCN10A; (+) strand; PAM type: YTN; PAM sequence: TTG
  source 1..20: mol_type = other DNA
ggggagggtgataagtaggg

SEQ ID NO: 71114 - DNA, 20 bp, synthetic construct
  misc_feature 1..20: note = Description of Artificial Sequence: Synthetic oligonucleotide
  misc_feature 1..20: note = Target: SCN10A; (+) strand; PAM type: YTN; PAM sequence: CTG
  source 1..20: mol_type = other DNA
aaagaattgcttgaaagttt

SEQ ID NO: 71115 - DNA, 20 bp, synthetic construct
  misc_feature 1..20: note = Description of Artificial Sequence: Synthetic oligonucleotide
  misc_feature 1..20: note = Target: SCN10A; (+) strand; PAM type: YTN; PAM sequence: TTG
  source 1..20: mol_type = other DNA
cttgaaagttttttacagga

SEQ ID NO: 71116 - DNA, 20 bp, synthetic construct
  misc_feature 1..20: note = Description of Artificial Sequence: Synthetic oligonucleotide
  misc_feature 1..20: note = Target: SCN10A; (+) strand; PAM type: YTN; PAM sequence: CTT
  source 1..20: mol_type = other DNA
gaaagttttttacaggaacc

SEQ ID NO: 71117 - DNA, 20 bp, synthetic construct
  misc_feature 1..20: note = Description of Artificial Sequence: Synthetic oligonucleotide
  misc_feature 1..20: note = Target: SCN10A; (+) strand; PAM type: YTN; PAM sequence: TTG
  source 1..20: mol_type = other DNA
aaagttttttacaggaacca

SEQ ID NO: 71118 - DNA, 20 bp, synthetic construct
  misc_feature 1..20: note = Description of Artificial Sequence: Synthetic oligonucleotide
  misc_feature 1..20: note = Target: SCN10A; (+) strand; PAM type: YTN; PAM sequence: TTT
  source 1..20: mol_type = other DNA
tttacaggaaccagttgagc

SEQ ID NO: 71119 - DNA, 20 bp, synthetic construct
  misc_feature 1..20: note = Description of Artificial Sequence: Synthetic oligonucleotide
  misc_feature 1..20: note = Target: SCN10A; (+) strand; PAM type: YTN; PAM sequence: TTT
  source 1..20: mol_type = other DNA
ttacaggaaccagttgagct

SEQ ID NO: 71120 - DNA, 20 bp, synthetic construct
  misc_feature 1..20: note = Description of Artificial Sequence: Synthetic oligonucleotide
  misc_feature 1..20: note = Target: SCN10A; (+) strand; PAM type: YTN; PAM sequence: TTT
  source 1..20: mol_type = other DNA
tacaggaaccagttgagctt

SEQ ID NO: 71121 - DNA, 20 bp, synthetic construct
  misc_feature 1..20: note = Description of Artificial Sequence: Synthetic oligonucleotide
  misc_feature 1..20: note = Target: SCN10A; (+) strand; PAM type: YTN; PAM sequence: TTT
  source 1..20: mol_type = other DNA
acaggaaccagttgagcttt

SEQ ID NO: 71122 - DNA, 20 bp, synthetic construct
  misc_feature 1..20: note = Description of Artificial Sequence: Synthetic oligonucleotide
  misc_feature 1..20: note = Target: SCN10A; (+) strand; PAM type: YTN; PAM sequence: TTA
  source 1..20: mol_type = other DNA
caggaaccagttgagctttc

SEQ ID NO: 71123 - DNA, 20 bp, synthetic construct
  misc_feature 1..20: note = Description of Artificial Sequence: Synthetic oligonucleotide
  misc_feature 1..20: note = Target: SCN10A; (+) strand; PAM type: YTN; PAM sequence: TTG
  source 1..20: mol_type = other DNA
agctttctagatgctgcttt

SEQ ID NO: 71124 - DNA, 20 bp, synthetic construct
  misc_feature 1..20: note = Description of Artificial Sequence: Synthetic oligonucleotide
  misc_feature 1..20: note = Target: SCN10A; (+) strand; PAM type: YTN; PAM sequence: CTT
  source 1..20: mol_type = other DNA
tctagatgctgctttatgcc

SEQ ID NO: 71125 - DNA, 20 bp, synthetic construct
  misc_feature 1..20: note = Description of Artificial Sequence: Synthetic oligonucleotide
  misc_feature 1..20: note = Target: SCN10A; (+) strand; PAM type: YTN; PAM sequence: TTT
  source 1..20: mol_type = other DNA
ctagatgctgctttatgcca

SEQ ID NO: 71126 - DNA, 20 bp, synthetic construct
  misc_feature 1..20: note = Description of Artificial Sequence: Synthetic oligonucleotide
  misc_feature 1..20: note = Target: SCN10A; (+) strand; PAM type: YTN; PAM sequence: TTC
  source 1..20: mol_type = other DNA
tagatgctgctttatgccat

SEQ ID NO: 71127 - DNA, 20 bp, synthetic construct
  misc_feature 1..20: note = Description of Artificial Sequence: Synthetic oligonucleotide
  misc_feature 1..20: note = Target: SCN10A; (+) strand; PAM type: YTN; PAM sequence: CTA
  source 1..20: mol_type = other DNA
gatgctgctttatgccatcc

SEQ ID NO: 71128 - DNA, 20 bp, synthetic construct
  misc_feature 1..20: note = Description of Artificial Sequence: Synthetic oligonucleotide
  misc_feature 1..20: note = Target: SCN10A; (+) strand; PAM type: YTN; PAM sequence: CTG
  source 1..20: mol_type = other DNA
ctttatgccatccattcaat

SEQ ID NO: 71129 - DNA, 20 bp, synthetic construct
  misc_feature 1..20: note = Description of Artificial Sequence: Synthetic oligonucleotide
  misc_feature 1..20: note = Target: SCN10A; (+) strand; PAM type: YTN; PAM sequence: CTT
  source 1..20: mol_type = other DNA
tatgccatccattcaatgag

SEQ ID NO: 71130 - DNA, 20 bp, synthetic construct
  misc_feature 1..20: note = Description of Artificial Sequence: Synthetic oligonucleotide
  misc_feature 1..20: note = Target: SCN10A; (+) strand; PAM type: YTN; PAM sequence: TTT
  source 1..20: mol_type = other DNA
atgccatccattcaatgaga

SEQ ID NO: 71131 - DNA, 20 bp, synthetic construct
  misc_feature 1..20: note = Description of Artificial Sequence: Synthetic oligonucleotide
  misc_feature 1..20: note = Target: SCN10A; (+) strand; PAM type: YTN; PAM sequence: TTA
  source 1..20: mol_type = other DNA
tgccatccattcaatgagaa

SEQ ID NO: 71132 - DNA, 20 bp, synthetic construct
  misc_feature 1..20: note = Description of Artificial Sequence: Synthetic oligonucleotide
  misc_feature 1..20: note = Target: SCN10A; (+) strand; PAM type: YTN; PAM sequence: TTC
  source 1..20: mol_type = other DNA
aatgagaaactgtttctgct

SEQ ID NO: 71133 - DNA, 20 bp, synthetic construct
  misc_feature 1..20: note = Description of Artificial Sequence: Synthetic oligonucleotide
  misc_feature 1..20: note = Target: SCN10A; (+) strand; PAM type: YTN; PAM sequence: CTG
  source 1..20: mol_type = other DNA
tttctgctccagaaatggat

SEQ ID NO: 71134 - DNA, 20 bp, synthetic construct
  misc_feature 1..20: note = Description of Artificial Sequence: Synthetic oligonucleotide
  misc_feature 1..20: note = Target: SCN10A; (+) strand; PAM type: YTN; PAM sequence: TTT
  source 1..20: mol_type = other DNA
ctgctccagaaatggattgg

SEQ ID NO: 71135 - DNA, 20 bp, synthetic construct
  misc_feature 1..20: note = Description of Artificial Sequence: Synthetic oligonucleotide
  misc_feature 1..20: note = Target: SCN10A; (+) strand; PAM type: YTN; PAM sequence: TTC
  source 1..20: mol_type = other DNA
tgctccagaaatggattgga

SEQ ID NO: 71136 - DNA, 20 bp, synthetic construct
  misc_feature 1..20: note = Description of Artificial Sequence: Synthetic oligonucleotide
  misc_feature 1..20: note = Target: SCN10A; (+) strand; PAM type: YTN; PAM sequence: CTG
  source 1..20: mol_type = other DNA
ctccagaaatggattggatg

SEQ ID NO: 71137 - DNA, 20 bp, synthetic construct
  misc_feature 1..20: note = Description of Artificial Sequence: Synthetic oligonucleotide
  misc_feature 1..20: note = Target: SCN10A; (+) strand; PAM type: YTN; PAM sequence: CTC
  source 1..20: mol_type = other DNA
cagaaatggattggatgctc

SEQ ID NO: 71138 - DNA, 20 bp, synthetic construct
  misc_feature 1..20: note = Description of Artificial Sequence: Synthetic oligonucleotide
  misc_feature 1..20: note = Target: SCN10A; (+) strand; PAM type: YTN; PAM sequence: TTG
  source 1..20: mol_type = other DNA
gatgctcattttcttaagag

SEQ ID NO: 71139 - DNA, 20 bp, synthetic construct
  misc_feature 1..20: note = Description of Artificial Sequence: Synthetic oligonucleotide
  misc_feature 1..20: note = Target: SCN10A; (+) strand; PAM type: YTN; PAM sequence: CTC
  source 1..20: mol_type = other DNA
attttcttaagagttgaaga

SEQ ID NO: 71140 - DNA, 20 bp, synthetic construct
  misc_feature 1..20: note = Description of Artificial Sequence: Synthetic oligonucleotide
  misc_feature 1..20: note = Target: SCN10A; (+) strand; PAM type: YTN; PAM sequence: TTT
  source 1..20: mol_type = other DNA
tcttaagagttgaagaagag

SEQ ID NO: 71141 - DNA, 20 bp, synthetic construct
  misc_feature 1..20: note = Description of Artificial Sequence: Synthetic oligonucleotide
  misc_feature 1..20: note = Target: SCN10A; (+) strand; PAM type: YTN; PAM sequence: TTT
  source 1..20: mol_type = other DNA
cttaagagttgaagaagagg

SEQ ID NO: 71142 - DNA, 20 bp, synthetic construct
  misc_feature 1..20: note = Description of Artificial Sequence: Synthetic oligonucleotide
  misc_feature 1..20: note = Target: SCN10A; (+) strand; PAM type: YTN; PAM sequence: TTC
  source 1..20: mol_type = other DNA
ttaagagttgaagaagaggg

SEQ ID NO: 71143 - DNA, 20 bp, synthetic construct
  misc_feature 1..20: note = Description of Artificial Sequence: Synthetic oligonucleotide
  misc_feature 1..20: note = Target: SCN10A; (+) strand; PAM type: YTN; PAM sequence: CTT
  source 1..20: mol_type = other DNA
aagagttgaagaagagggaa

SEQ ID NO: 71144 - DNA, 20 bp, synthetic construct
  misc_feature 1..20: note = Description of Artificial Sequence: Synthetic oligonucleotide
  misc_feature 1..20: note = Target: SCN10A; (+) strand; PAM type: YTN; PAM sequence: TTA
  source 1..20: mol_type = other DNA
agagttgaagaagagggaaa

SEQ ID NO: 71145 - DNA, 20 bp, synthetic construct
  misc_feature 1..20: note = Description of Artificial Sequence: Synthetic oligonucleotide
  misc_feature 1..20: note = Target: SCN10A; (+) strand; PAM type: YTN; PAM sequence: TTG
  source 1..20: mol_type = other DNA
aagaagagggaaacagttgc

SEQ ID NO: 71146 - DNA, 20 bp, synthetic construct
  misc_feature 1..20: note = Description of Artificial Sequence: Synthetic oligonucleotide
  misc_feature 1..20: note = Target: SCN10A; (+) strand; PAM type: YTN; PAM sequence: TTG
  source 1..20: mol_type = other DNA
catactgaaaaatgcatata

SEQ ID NO: 71147 - DNA, 20 bp, synthetic construct
  misc_feature 1..20: note = Description of Artificial Sequence: Synthetic oligonucleotide
  misc_feature 1..20: note = Target: SCN10A; (+) strand; PAM type: YTN; PAM sequence: CTG
  source 1..20: mol_type = other DNA
aaaaatgcatataaagaaaa

SEQ ID NO: 71148 - DNA, 20 bp, synthetic construct
  misc_feature 1..20: note = Description of Artificial Sequence: Synthetic oligonucleotide
  misc_feature 1..20: note = Target: SCN10A; (+) strand; PAM type: YTN; PAM sequence: TTT
  source 1..20: mol_type = other DNA
acctactgaaaggcaaacaa

SEQ ID NO: 71149 - DNA, 20 bp, synthetic construct
  misc_feature 1..20: note = Description of Artificial Sequence: Synthetic oligonucleotide
  misc_feature 1..20: note = Target: SCN10A; (+) strand; PAM type: YTN; PAM sequence: TTA
  source 1..20: mol_type = other DNA
cctactgaaaggcaaacaac

SEQ ID NO: 71150 - DNA, 20 bp, synthetic construct
  misc_feature 1..20: note = Description of Artificial Sequence: Synthetic oligonucleotide
  misc_feature 1..20: note = Target: SCN10A; (+) strand; PAM type: YTN; PAM sequence: CTA
  source 1..20: mol_type = other DNA
ctgaaaggcaaacaactccc

SEQ ID NO: 71151 - DNA, 20 bp, synthetic construct
  misc_feature 1..20: note = Description of Artificial Sequence: Synthetic oligonucleotide
  misc_feature 1..20: note = Target: SCN10A; (+) strand; PAM type: YTN; PAM sequence: CTG
  source 1..20: mol_type = other DNA
aaaggcaaacaactcccctc

SEQ ID NO: 71152 - DNA, 20 bp, synthetic construct
  misc_feature 1..20: note = Description of Artificial Sequence: Synthetic oligonucleotide
  misc_feature 1..20: note = Target: SCN10A; (+) strand; PAM type: YTN; PAM sequence: CTC
  source 1..20: mol_type = other DNA
ccctccctattcacttctgc

SEQ ID NO: 71153 - DNA, 20 bp, synthetic construct
  misc_feature 1..20: note = Description of Artificial Sequence: Synthetic oligonucleotide
  misc_feature 1..20: note = Target: SCN10A; (+) strand; PAM type: YTN; PAM sequence: CTC
  source 1..20: mol_type = other DNA
cctattcacttctgctcctc

SEQ ID NO: 71154 - DNA, 20 bp, synthetic construct
  misc_feature 1..20: note = Description of Artificial Sequence: Synthetic oligonucleotide
  misc_feature 1..20: note = Target: SCN10A; (+) strand; PAM type: YTN; PAM sequence: CTA
  source 1..20: mol_type = other DNA
ttcacttctgctcctcgtta

SEQ ID NO: 71155 - DNA, 20 bp, synthetic construct
  misc_feature 1..20: note = Description of Artificial Sequence: Synthetic oligonucleotide
  misc_feature 1..20: note = Target: SCN10A; (+) strand; PAM type: YTN; PAM sequence: TTC
  source 1..20: mol_type = other DNA
acttctgctcctcgttaagt

SEQ ID NO: 71156 - DNA, 20 bp, synthetic construct
  misc_feature 1..20: note = Description of Artificial Sequence: Synthetic oligonucleotide
  misc_feature 1..20: note = Target: SCN10A; (+) strand; PAM type: YTN; PAM sequence: CTT
  source 1..20: mol_type = other DNA
ctgctcctcgttaagtttcc

SEQ ID NO: 71157 - DNA, 20 bp, synthetic construct
  misc_feature 1..20: note = Description of Artificial Sequence: Synthetic oligonucleotide
  misc_feature 1..20: note = Target: SCN10A; (+) strand; PAM type: YTN; PAM sequence: TTC
  source 1..20: mol_type = other DNA
tgctcctcgttaagtttcca

SEQ ID NO: 71158 - DNA, 20 bp, synthetic construct
  misc_feature 1..20: note = Description of Artificial Sequence: Synthetic oligonucleotide
  misc_feature 1..20: note = Target: SCN10A; (+) strand; PAM type: YTN; PAM sequence: CTG
  source 1..20: mol_type = other DNA
ctcctcgttaagtttccaga

SEQ ID NO: 71159 - DNA, 20 bp, synthetic construct
  misc_feature 1..20: note = Description of Artificial Sequence: Synthetic oligonucleotide
  misc_feature 1..20: note = Target: SCN10A; (+) strand; PAM type: YTN; PAM sequence: CTC
  source 1..20: mol_type = other DNA
ctcgttaagtttccagaaga

SEQ ID NO: 71160 - DNA, 20 bp, synthetic construct
  misc_feature 1..20: note = Description of Artificial Sequence: Synthetic oligonucleotide
  misc_feature 1..20: note = Target: SCN10A; (+) strand; PAM type: YTN; PAM sequence: CTC
  source 1..20: mol_type = other DNA
gttaagtttccagaagataa

SEQ ID NO: 71161 - DNA, 20 bp, synthetic construct
  misc_feature 1..20: note = Description of Artificial Sequence: Synthetic oligonucleotide
  misc_feature 1..20: note = Target: SCN10A; (+) strand; PAM type: YTN; PAM sequence: TTA
  source 1..20: mol_type = other DNA
agtttccagaagataatctg

SEQ ID NO: 71162 - DNA, 20 bp, synthetic construct
  misc_feature 1..20: note = Description of Artificial Sequence: Synthetic oligonucleotide
  misc_feature 1..20: note = Target: SCN10A; (+) strand; PAM type: YTN; PAM sequence: TTT
  source 1..20: mol_type = other DNA
ccagaagataatctggttta

SEQ ID NO: 71163 - DNA, 20 bp, synthetic construct
  misc_feature 1..20: note = Description of Artificial Sequence: Synthetic oligonucleotide
  misc_feature 1..20: note = Target: SCN10A; (+) strand; PAM type: YTN; PAM sequence: TTC
  source 1..20: mol_type = other DNA
cagaagataatctggtttag

SEQ ID NO: 71164 - DNA, 20 bp, synthetic construct
  misc_feature 1..20: note = Description of Artificial Sequence: Synthetic oligonucleotide
  misc_feature 1..20: note = Target: SCN10A; (+) strand; PAM type: YTN; PAM sequence: CTG
  source 1..20: mol_type = other DNA
gtttagagcccatgaagatg

SEQ ID NO: 71165 - DNA, 20 bp, synthetic construct
  misc_feature 1..20: note = Description of Artificial Sequence: Synthetic oligonucleotide
  misc_feature 1..20: note = Target: SCN10A; (+) strand; PAM type: YTN; PAM sequence: TTT
  source 1..20: mol_type = other DNA
agagcccatgaagatgctgc

SEQ ID NO: 71166 - DNA, 20 bp, synthetic construct
  misc_feature 1..20: note = Description of Artificial Sequence: Synthetic oligonucleotide
  misc_feature 1..20: note = Target: SCN10A; (+) strand; PAM type: YTN; PAM sequence: TTA
  source 1..20: mol_type = other DNA
gagcccatgaagatgctgca

SEQ ID NO: 71167 - DNA, 20 bp, synthetic construct
  misc_feature 1..20: note = Description of Artificial Sequence: Synthetic oligonucleotide
  misc_feature 1..20: note = Target: SCN10A; (+) strand; PAM type: YTN; PAM sequence: CTG
  source 1..20: mol_type = other DNA
cacttttaacatgaacagcc

SEQ ID NO: 71168 - DNA, 20 bp, synthetic construct
  misc_feature 1..20: note = Description of Artificial Sequence: Synthetic oligonucleotide
  misc_feature 1..20: note = Target: SCN10A; (+) strand; PAM type: YTN; PAM sequence: CTT
  source 1..20: mol_type = other DNA
ttaacatgaacagccagcca

SEQ ID NO: 71169 - DNA, 20 bp, synthetic construct
  misc_feature 1..20: note = Description of Artificial Sequence: Synthetic oligonucleotide
  misc_feature 1..20: note = Target: SCN10A; (+) strand; PAM type: YTN; PAM sequence: TTT
  source 1..20: mol_type = other DNA
taacatgaacagccagccaa

SEQ ID NO: 71170 - DNA, 20 bp, synthetic construct
  misc_feature 1..20: note = Description of Artificial Sequence: Synthetic oligonucleotide
  misc_feature 1..20: note = Target: SCN10A; (+) strand; PAM type: YTN; PAM sequence: TTT
  source 1..20: mol_type = other DNA
aacatgaacagccagccaag

SEQ ID NO: 71171 - DNA, 20 bp, synthetic construct
  misc_feature 1..20: note = Description of Artificial Sequence: Synthetic oligonucleotide
  misc_feature 1..20: note = Target: SCN10A; (+) strand; PAM type: YTN; PAM sequence: TTA
  source 1..20: mol_type = other DNA
acatgaacagccagccaagg

SEQ ID NO: 71172 - DNA, 20 bp, synthetic construct
  misc_feature 1..20: note = Description of Artificial Sequence: Synthetic oligonucleotide
  misc_feature 1..20: note = Target: SCN10A; (+) strand; PAM type: YTN; PAM sequence: TTT
  source 1..20: mol_type = other DNA
gaaggatgcttctaacacca

SEQ ID NO: 71173 - DNA, 20 bp, synthetic construct
  misc_feature 1..20: note = Description of Artificial Sequence: Synthetic oligonucleotide
  misc_feature 1..20: note = Target: SCN10A; (+) strand; PAM type: YTN; PAM sequence: TTG
  source 1..20: mol_type = other DNA
aaggatgcttctaacaccag

SEQ ID NO: 71174 - DNA, 20 bp, synthetic construct
  misc_feature 1..20: note = Description of Artificial Sequence: Synthetic oligonucleotide
  misc_feature 1..20: note = Target: SCN10A; (+) strand; PAM type: YTN; PAM sequence: CTT
  source 1..20: mol_type = other DNA
ctaacaccagaaaccaaagc

SEQ ID NO: 71175 - DNA, 20 bp, synthetic construct
  misc_feature 1..20: note = Description of Artificial Sequence: Synthetic oligonucleotide
  misc_feature 1..20: note = Target: SCN10A; (+) strand; PAM type: YTN; PAM sequence: TTC
  source 1..20: mol_type = other DNA
taacaccagaaaccaaagca

SEQ ID NO: 71176 - DNA, 20 bp, synthetic construct
  misc_feature 1..20: note = Description of Artificial Sequence: Synthetic oligonucleotide
  misc_feature 1..20: note = Target: SCN10A; (+) strand; PAM type: YTN; PAM sequence: CTA
  source 1..20: mol_type = other DNA
acaccagaaaccaaagcaac

SEQ ID NO: 71177 - DNA, 20 bp, synthetic construct
  misc_feature 1..20: note = Description of Artificial Sequence: Synthetic oligonucleotide
  misc_feature 1..20: note = Target: SCN10A; (+) strand; PAM type: YTN; PAM sequence: CTG
  source 1..20: mol_type = other DNA
aaaaaaaaaaaaaaaagaaa

SEQ ID NO: 71178 - DNA, 20 bp, synthetic construct
  misc_feature 1..20: note = Description of Artificial Sequence: Synthetic oligonucleotide
  misc_feature 1..20: note = Target: SCN10A; (+) strand; PAM type: YTN; PAM sequence: TTA
  source 1..20: mol_type = other DNA
gagaaataaaactgtattgg

SEQ ID NO: 71179 - DNA, 20 bp, synthetic construct
  misc_feature 1..20: note = Description of Artificial Sequence: Synthetic oligonucleotide
  misc_feature 1..20: note = Target: SCN10A; (+) strand; PAM type: YTN; PAM sequence: CTG
  source 1..20: mol_type = other DNA
tattggccaggcgctgtggc

SEQ ID NO: 71180 - DNA, 20 bp, synthetic construct
  misc_feature 1..20: note = Description of Artificial Sequence: Synthetic oligonucleotide
  misc_feature 1..20: note = Target: SCN10A; (+) strand; PAM type: YTN; PAM sequence: TTG
  source 1..20: mol_type = other DNA
gccaggcgctgtggctcacg

SEQ ID NO: 71181 - DNA, 20 bp, synthetic construct
  misc_feature 1..20: note = Description of Artificial Sequence: Synthetic oligonucleotide
  misc_feature 1..20: note = Target: SCN10A; (+) strand; PAM type: YTN; PAM sequence: CTG
  source 1..20: mol_type = other DNA
tggctcacgcctgtaatcgc

SEQ ID NO: 71182 - DNA, 20 bp, synthetic construct
  misc_feature 1..20: note = Description of Artificial Sequence: Synthetic oligonucleotide
  misc_feature 1..20: note = Target: SCN10A; (+) strand; PAM type: YTN; PAM sequence: CTC
  source 1..20: mol_type = other DNA
acgcctgtaatcgcagcact

SEQ ID NO: 71183 - DNA, 20 bp, synthetic construct
  misc_feature 1..20: note = Description of Artificial Sequence: Synthetic oligonucleotide
  misc_feature 1..20: note = Target: SCN10A; (+) strand; PAM type: YTN; PAM sequence: CTG
  source 1..20: mol_type = other DNA
taatcgcagcactttgggag

SEQ ID NO: 71184 - DNA, 20 bp, synthetic construct
  misc_feature 1..20: note = Description of Artificial Sequence: Synthetic oligonucleotide
  misc_feature 1..20: note = Target: SCN10A; (+) strand; PAM type: YTN; PAM sequence: CTT
  source 1..20: mol_type = other DNA
tgggaggccgaggcgggcag

SEQ ID NO: 71185 - DNA, 20 bp, synthetic construct
  misc_feature 1..20: note = Description of Artificial Sequence: Synthetic oligonucleotide
  misc_feature 1..20: note = Target: SCN10A; (+) strand; PAM type: YTN; PAM sequence: TTT
  source 1..20: mol_type = other DNA
gggaggccgaggcgggcaga

SEQ ID NO: 71186 - DNA, 20 bp, synthetic construct
  misc_feature 1..20: note = Description of Artificial Sequence: Synthetic oligonucleotide
  misc_feature 1..20: note = Target: SCN10A; (+) strand; PAM type: YTN; PAM sequence: TTG
  source 1..20: mol_type = other DNA
ggaggccgaggcgggcagat

SEQ ID NO: 71187 - DNA, 20 bp, synthetic construct
  misc_feature 1..20: note = Description of Artificial Sequence: Synthetic oligonucleotide
  misc_feature 1..20: note = Target: SCN10A; (+) strand; PAM type: YTN; PAM sequence: TTA
  source 1..20: mol_type = other DNA
cgaggtcaggagatcgagac

SEQ ID NO: 71188 - DNA, 20 bp, synthetic construct
  misc_feature 1..20: note = Description of Artificial Sequence: Synthetic oligonucleotide
  misc_feature 1..20: note = Target: SCN10A; (+) strand; PAM type: YTN; PAM sequence: CTG
  source 1..20: mol_type = other DNA
gctaacgcggtgaaaccccg

SEQ ID NO: 71189 - DNA, 20 bp, synthetic construct
  misc_feature 1..20: note = Description of Artificial Sequence: Synthetic oligonucleotide
  misc_feature 1..20: note = Target: SCN10A; (+) strand; PAM type: YTN; PAM sequence: CTA
  source 1..20: mol_type = other DNA
acgcggtgaaaccccgtctc

SEQ ID NO: 71190 - DNA, 20 bp, synthetic construct
  misc_feature 1..20: note = Description of Artificial Sequence: Synthetic oligonucleotide
  misc_feature 1..20: note = Target: SCN10A; (+) strand; PAM type: YTN; PAM sequence: CTC
  source 1..20: mol_type = other DNA
tactaaaaatacaaaaaatt

SEQ ID NO: 71191 - DNA, 20 bp, synthetic construct
  misc_feature 1..20: note = Description of Artificial Sequence: Synthetic oligonucleotide
  misc_feature 1..20: note = Target: SCN10A; (+) strand; PAM type: YTN; PAM sequence: CTA
  source 1..20: mol_type = other DNA
ctaaaaatacaaaaaattag

SEQ ID NO: 71192 - DNA, 20 bp, synthetic construct
  misc_feature 1..20: note = Description of Artificial Sequence: Synthetic oligonucleotide
  misc_feature 1..20: note = Target: SCN10A; (+) strand; PAM type: YTN; PAM sequence: CTA
  source 1..20: mol_type = other DNA
aaaatacaaaaaattagccg

SEQ ID NO: 71193 - DNA, 20 bp, synthetic construct
  misc_feature 1..20: note = Description of Artificial Sequence: Synthetic oligonucleotide
  misc_feature 1..20: note = Target: SCN10A; (+) strand; PAM type: YTN; PAM sequence: TTA
  source 1..20: mol_type = other DNA
gccgggcgccttggcgggca

SEQ ID NO: 71194 - DNA, 20 bp, synthetic construct
  misc_feature 1..20: note = Description of Artificial Sequence: Synthetic oligonucleotide
  misc_feature 1..20: note = Target: SCN10A; (+) strand; PAM type: YTN; PAM sequence: CTT
  source 1..20: mol_type = other DNA
ggcgggcacctgtagttcca

SEQ ID NO: 71195 - DNA, 20 bp, synthetic construct
  misc_feature 1..20: note = Description of Artificial Sequence: Synthetic oligonucleotide
  misc_feature 1..20: note = Target: SCN10A; (+) strand; PAM type: YTN; PAM sequence: TTG
  source 1..20: mol_type = other DNA
gcgggcacctgtagttccag

SEQ ID NO: 71196 - DNA, 20 bp, synthetic construct
  misc_feature 1..20: note = Description of Artificial Sequence: Synthetic oligonucleotide
  misc_feature 1..20: note = Target: SCN10A; (+) strand; PAM type: YTN; PAM sequence: CTG
  source 1..20: mol_type = other DNA
tagttccagctactccggag

SEQ ID NO: 71197 - DNA, 20 bp, synthetic construct
  misc_feature 1..20: note = Description of Artificial Sequence: Synthetic oligonucleotide
  misc_feature 1..20: note = Target: SCN10A; (+) strand; PAM type: YTN; PAM sequence: TTC
  source 1..20: mol_type = other DNA
cagctactccggaggctgag

SEQ ID NO: 71198 - DNA, 20 bp, synthetic construct
  misc_feature 1..20: note = Description of Artificial Sequence: Synthetic oligonucleotide
  misc_feature 1..20: note = Target: SCN10A; (+) strand; PAM type: YTN; PAM sequence: CTA
  source 1..20: mol_type = other DNA
ctccggaggctgaggcggga

SEQ ID NO: 71199 - DNA, 20 bp, synthetic construct
  misc_feature 1..20: note = Description of Artificial Sequence: Synthetic oligonucleotide
  misc_feature 1..20: note = Target: SCN10A; (+) strand; PAM type: YTN; PAM sequence: CTC
  source 1..20: mol_type = other DNA
cggaggctgaggcgggagaa

SEQ ID NO: 71200 - DNA, 20 bp, synthetic construct
  misc_feature 1..20: note = Description of Artificial Sequence: Synthetic oligonucleotide
  misc_feature 1..20: note = Target: SCN10A; (+) strand; PAM type: YTN; PAM sequence: CTG
  source 1..20: mol_type = other DNA
aggcgggagaatggcgtgaa

SEQ ID NO: 71201 - DNA, 20 bp, synthetic construct
  misc_feature 1..20: note = Description of Artificial Sequence: Synthetic oligonucleotide
  misc_feature 1..20: note = Target: SCN10A; (+) strand; PAM type: YTN; PAM sequence: CTT
  source 1..20: mol_type = other DNA
gcagtgagcctagatcgcgt

SEQ ID NO: 71202 - DNA, 20 bp, synthetic construct
  misc_feature 1..20: note = Description of Artificial Sequence: Synthetic oligonucleotide
  misc_feature 1..20: note = Target: SCN10A; (+) strand; PAM type: YTN; PAM sequence: TTG
  source 1..20: mol_type = other DNA
cagtgagcctagatcgcgtc

SEQ ID NO: 71203 - DNA, 20 bp, synthetic construct
  misc_feature 1..20: note = Description of Artificial Sequence: Synthetic oligonucleotide
  misc_feature 1..20: note = Target: SCN10A; (+) strand; PAM type: YTN; PAM sequence: CTA
  source 1..20: mol_type = other DNA
gatcgcgtcactgcactcca

SEQ ID NO: 71204 - DNA, 20 bp, synthetic construct
  misc_feature 1..20: note = Description of Artificial Sequence: Synthetic oligonucleotide
  misc_feature 1..20: note = Target: SCN10A; (+) strand; PAM type: YTN; PAM sequence: CTG
  source 1..20: mol_type = other DNA
cactccagtctgggtgacag

SEQ ID NO: 71205 - DNA, 20 bp, synthetic construct
  misc_feature 1..20: note = Description of Artificial Sequence: Synthetic oligonucleotide
  misc_feature 1..20: note = Target: SCN10A; (+) strand; PAM type: YTN; PAM sequence: CTC
  source 1..20: mol_type = other DNA
cagtctgggtgacagagcaa

SEQ ID NO: 71206 - DNA, 20 bp, synthetic construct
  misc_feature 1..20: note = Description of Artificial Sequence: Synthetic oligonucleotide
  misc_feature 1..20: note = Target: SCN10A; (+) strand; PAM type: YTN; PAM sequence: CTG
  source 1..20: mol_type = other DNA
ggtgacagagcaagacttcg

SEQ ID NO: 71207 - DNA, 20 bp, synthetic construct
  misc_feature 1..20: note = Description of Artificial Sequence: Synthetic oligonucleotide
  misc_feature 1..20: note = Target: SCN10A; (+) strand; PAM type: YTN; PAM sequence: CTT
  source 1..20: mol_type = other DNA
cgtctccaaaacaacaacaa

SEQ ID NO: 71208 - DNA, 20 bp, synthetic construct
  misc_feature 1..20: note = Description of Artificial Sequence: Synthetic oligonucleotide
  misc_feature 1..20: note = Target: SCN10A; (+) strand; PAM type: YTN; PAM sequence: TTC
  source 1..20: mol_type = other DNA
gtctccaaaacaacaacaac

SEQ ID NO: 71209 - DNA, 20 bp, synthetic construct
  misc_feature 1..20: note = Description of Artificial Sequence: Synthetic oligonucleotide
  misc_feature 1..20: note = Target: SCN10A; (+) strand; PAM type: YTN; PAM sequence: CTC
  source 1..20: mol_type = other DNA
caaaacaacaacaacaacag

SEQ ID NO: 71210 - DNA, 20 bp, synthetic construct
  misc_feature 1..20: note = Description of Artificial Sequence: Synthetic oligonucleotide
  misc_feature 1..20: note = Target: SCN10A; (+) strand; PAM type: YTN; PAM sequence: CTG
  source 1..20: mol_type = other DNA
tactaatatttttagagagt

SEQ ID NO: 71211 - DNA, 20 bp, synthetic construct
  misc_feature 1..20: note = Description of Artificial Sequence: Synthetic oligonucleotide
  misc_feature 1..20: note = Target: SCN10A; (+) strand; PAM type: YTN; PAM sequence: CTA
  source 1..20: mol_type = other DNA
atatttttagagagttaaga

SEQ ID NO: 71212 - DNA, 20 bp, synthetic construct
  misc_feature 1..20: note = Description of Artificial Sequence: Synthetic oligonucleotide
  misc_feature 1..20: note = Target: SCN10A; (+) strand; PAM type: YTN; PAM sequence: TTT
  source 1..20: mol_type = other DNA
ttagagagttaagaggtgag

SEQ ID NO: 71213 - DNA, 20 bp, synthetic construct
  misc_feature 1..20: note = Description of Artificial Sequence: Synthetic oligonucleotide
  misc_feature 1..20: note = Target: SCN10A; (+) strand; PAM type: YTN; PAM sequence: TTT
  source 1..20: mol_type = other DNA
tagagagttaagaggtgaga

SEQ ID NO: 71214 - DNA, 20 bp, synthetic construct
  misc_feature 1..20: note = Description of Artificial Sequence: Synthetic oligonucleotide
  misc_feature 1..20: note = Target: SCN10A; (+) strand; PAM type: YTN; PAM sequence: TTT
  source 1..20: mol_type = other DNA
agagagttaagaggtgagaa

SEQ ID NO: 71215 - DNA, 20 bp, synthetic construct
  misc_feature 1..20: note = Description of Artificial Sequence: Synthetic oligonucleotide
  misc_feature 1..20: note = Target: SCN10A; (+) strand; PAM type: YTN; PAM sequence: TTA
  source 1..20: mol_type = other DNA
gagagttaagaggtgagaag

SEQ ID NO: 71216 - DNA, 20 bp, synthetic construct
  misc_feature 1..20: note = Description of Artificial Sequence: Synthetic oligonucleotide
  misc_feature 1..20: note = Target: SCN10A; (+) strand; PAM type: YTN; PAM sequence: TTA
  source 1..20: mol_type = other DNA
agaggtgagaagaggctcca

SEQ ID NO: 71217 - DNA, 20 bp, synthetic construct
  misc_feature 1..20: note = Description of Artificial Sequence: Synthetic oligonucleotide
  misc_feature 1..20: note = Target: SCN10A; (+) strand; PAM type: YTN; PAM sequence: CTC
  source 1..20: mol_type = other DNA
cacgtatagaacaagagcag

SEQ ID NO: 71218 - DNA, 20 bp, synthetic construct
  misc_feature 1..20: note = Description of Artificial Sequence: Synthetic oligonucleotide
  misc_feature 1..20: note = Target: SCN10A; (+) strand; PAM type: YTN; PAM sequence: CTT
  source 1..20: mol_type = other DNA
caaagacaaaatggaatttt

SEQ ID NO: 71219 - DNA, 20 bp, synthetic construct
  misc_feature 1..20: note = Description of Artificial Sequence: Synthetic oligonucleotide
  misc_feature 1..20: note = Target: SCN10A; (+) strand; PAM type: YTN; PAM sequence: TTC
  source 1..20: mol_type = other DNA
aaagacaaaatggaattttg

SEQ ID NO: 71220 - DNA, 20 bp, synthetic construct
  misc_feature 1..20: note = Description of Artificial Sequence: Synthetic oligonucleotide
  misc_feature 1..20: note = Target: SCN10A; (+) strand; PAM type: YTN; PAM sequence: TTT
  source 1..20: mol_type = other DNA
tgaaaacaaaaatatgatag

SEQ ID NO: 71221 - DNA, 20 bp, synthetic construct
  misc_feature 1..20: note = Description of Artificial Sequence: Synthetic oligonucleotide
  misc_feature 1..20: note = Target: SCN10A; (+) strand; PAM type: YTN; PAM sequence: TTT
  source 1..20: mol_type = other DNA
gaaaacaaaaatatgatagc

SEQ ID NO: 71222 - DNA, 20 bp, synthetic construct
  misc_feature 1..20: note = Description of Artificial Sequence: Synthetic oligonucleotide
  misc_feature 1..20: note = Target: SCN10A; (+) strand; PAM type: YTN; PAM sequence: TTG
  source 1..20: mol_type = other DNA
aaaacaaaaatatgatagca

SEQ ID NO: 71223 - DNA, 20 bp, synthetic construct
  misc_feature 1..20: note = Description of Artificial Sequence: Synthetic oligonucleotide
  misc_feature 1..20: note = Target: SCN10A; (+) strand; PAM type: YTN; PAM sequence: CTA
  source 1..20: mol_type = other DNA
ataggcggacttgtaaataa

SEQ ID NO: 71224 - DNA, 20 bp, synthetic construct
  misc_feature 1..20: note = Description of Artificial Sequence: Synthetic oligonucleotide
  misc_feature 1..20: note = Target: SCN10A; (+) strand; PAM type: YTN; PAM sequence: CTT
  source 1..20: mol_type = other DNA
gtaaataaagttttggaaat

SEQ ID NO: 71225 - DNA, 20 bp, synthetic construct
  misc_feature 1..20: note = Description of Artificial Sequence: Synthetic oligonucleotide
  misc_feature 1..20: note = Target: SCN10A; (+) strand; PAM type: YTN; PAM sequence: TTG
  source 1..20: mol_type = other DNA
taaataaagttttggaaatc

SEQ ID NO: 71226 - DNA, 20 bp, synthetic construct
  misc_feature 1..20: note = Description of Artificial Sequence: Synthetic oligonucleotide
  misc_feature 1..20: note = Target: SCN10A; (+) strand; PAM type: YTN; PAM sequence: TTT
  source 1..20: mol_type = other DNA
tggaaatctcacaggaagtg

SEQ ID NO: 71227 - DNA, 20 bp, synthetic construct
  misc_feature 1..20: note = Description of Artificial Sequence: Synthetic oligonucleotide
  misc_feature 1..20: note = Target: SCN10A; (+) strand; PAM type: YTN; PAM sequence: TTT
  source 1..20: mol_type = other DNA
ggaaatctcacaggaagtgg

SEQ ID NO: 71228 - DNA, 20 bp, synthetic construct
  misc_feature 1..20: note = Description of Artificial Sequence: Synthetic oligonucleotide
  misc_feature 1..20: note = Target: SCN10A; (+) strand; PAM type: YTN; PAM sequence: TTG
  source 1..20: mol_type = other DNA
gaaatctcacaggaagtgga

SEQ ID NO: 71229 - DNA, 20 bp, synthetic construct
  misc_feature 1..20: note = Description of Artificial Sequence: Synthetic oligonucleotide
  misc_feature 1..20: note = Target: SCN10A; (+) strand; PAM type: YTN; PAM sequence: CTC
  source 1..20: mol_type = other DNA
acaggaagtggaacaaaaaa

SEQ ID NO: 71230 - DNA, 20 bp, synthetic construct
  misc_feature 1..20: note = Description of Artificial Sequence: Synthetic oligonucleotide
  misc_feature 1..20: note = Target: SCN10A; (+) strand; PAM type: YTN; PAM sequence: TTT
  source 1..20: mol_type = other DNA
gaaaattagagaatcagact

SEQ ID NO: 71231 - DNA, 20 bp, synthetic construct
  misc_feature 1..20: note = Description of Artificial Sequence: Synthetic oligonucleotide
  misc_feature 1..20: note = Target: SCN10A; (+) strand; PAM type: YTN; PAM sequence: TTG
  source 1..20: mol_type = other DNA
aaaattagagaatcagacta

SEQ ID NO: 71232 - DNA, 20 bp, synthetic construct
  misc_feature 1..20: note = Description of Artificial Sequence: Synthetic oligonucleotide
  misc_feature 1..20: note = Target: SCN10A; (+) strand; PAM type: YTN; PAM sequence: TTA
  source 1..20: mol_type = other DNA
gagaatcagactaggaggta

SEQ ID NO: 71233 - DNA, 20 bp, synthetic construct
  misc_feature 1..20: note = Description of Artificial Sequence: Synthetic oligonucleotide
  misc_feature 1..20: note = Target: SCN10A; (+) strand; PAM type: YTN; PAM sequence: CTA
  source 1..20: mol_type = other DNA
ggaggtatattgtttgacta

SEQ ID NO: 71234 - DNA, 20 bp, synthetic construct
  misc_feature 1..20: note = Description of Artificial Sequence: Synthetic oligonucleotide
  misc_feature 1..20: note = Target: SCN10A; (+) strand; PAM type: YTN; PAM sequence: TTG
  source 1..20: mol_type = other DNA
tttgactaataggaggtcta

SEQ ID NO: 71235 - DNA, 20 bp, synthetic construct
  misc_feature 1..20: note = Description of Artificial Sequence: Synthetic oligonucleotide
  misc_feature 1..20: note = Target: SCN10A; (+) strand; PAM type: YTN; PAM sequence: TTT
  source 1..20: mol_type = other DNA
gactaataggaggtctagaa

SEQ ID NO: 71236 - DNA, 20 bp, synthetic construct
  misc_feature 1..20: note = Description of Artificial Sequence: Synthetic oligonucleotide
  misc_feature 1..20: note = Target: SCN10A; (+) strand; PAM type: YTN; PAM sequence: TTG
  source 1..20: mol_type = other DNA
actaataggaggtctagaaa

SEQ ID NO: 71237 - DNA, 20 bp, synthetic construct
  misc_feature 1..20: note = Description of Artificial Sequence: Synthetic oligonucleotide
  misc_feature 1..20: note = Target: SCN10A; (+) strand; PAM type: YTN; PAM sequence: CTA
  source 1..20: mol_type = other DNA
ataggaggtctagaaagaaa

SEQ ID NO: 71238 - DNA, 20 bp, synthetic construct
  misc_feature 1..20: note = Description of Artificial Sequence: Synthetic oligonucleotide
  misc_feature 1..20: note = Target: SCN10A; (+) strand; PAM type: YTN; PAM sequence: CTA
  source 1..20: mol_type = other DNA
gaaagaaattagaagacaat

SEQ ID NO: 71239 - DNA, 20 bp, synthetic construct
  misc_feature 1..20: note = Description of Artificial Sequence: Synthetic oligonucleotide
  misc_feature 1..20: note = Target: SCN10A; (+) strand; PAM type: YTN; PAM sequence: TTA
  source 1..20: mol_type = other DNA
gaagacaatgagcaaggcct

SEQ ID NO: 71240 - DNA, 20 bp, synthetic construct
  misc_feature 1..20: note = Description of Artificial Sequence: Synthetic oligonucleotide
  misc_feature 1..20: note = Target: SCN10A; (+) strand; PAM type: YTN; PAM sequence: CTT
  source 1..20: mol_type = other DNA
caaaattaagagggaaataa

SEQ ID NO: 71241 - DNA, 20 bp, synthetic construct
  misc_feature 1..20: note = Description of Artificial Sequence: Synthetic oligonucleotide
  misc_feature 1..20: note = Target: SCN10A; (+) strand; PAM type: YTN; PAM sequence: TTC
  source 1..20: mol_type = other DNA
aaaattaagagggaaataat

SEQ ID NO: 71242 - DNA, 20 bp, synthetic construct
  misc_feature 1..20: note = Description of Artificial Sequence: Synthetic oligonucleotide
  misc_feature 1..20: note = Target: SCN10A; (+) strand; PAM type: YTN; PAM sequence: TTA
  source 1..20: mol_type = other DNA
agagggaaataatttctaat

SEQ ID NO: 71243 - DNA, 20 bp, synthetic construct
  misc_feature 1..20: note = Description of Artificial Sequence: Synthetic oligonucleotide
  misc_feature 1..20: note = Target: SCN10A; (+) strand; PAM type: YTN; PAM sequence: TTT
  source 1..20: mol_type = other DNA
ctaatacagaagtctttccc

SEQ ID NO: 71244 - DNA, 20 bp, synthetic construct
  misc_feature 1..20: note = Description of Artificial Sequence: Synthetic oligonucleotide
  misc_feature 1..20: note = Target: SCN10A; (+) strand; PAM type: YTN; PAM sequence: TTC
  source 1..20: mol_type = other DNA
taatacagaagtctttccct

SEQ ID NO: 71245 - DNA, 20 bp, synthetic construct
  misc_feature 1..20: note = Description of Artificial Sequence: Synthetic oligonucleotide
  misc_feature 1..20: note = Target: SCN10A; (+) strand; PAM type: YTN; PAM sequence: CTA
  source 1..20: mol_type = other DNA
atacagaagtctttccctag

SEQ ID NO: 71246 - DNA, 20 bp, synthetic construct
  misc_feature 1..20: note = Description of Artificial Sequence: Synthetic oligonucleotide
  misc_feature 1..20: note = Target: SCN10A; (+) strand; PAM type: YTN; PAM sequence: CTT
  source 1..20: mol_type = other DNA
tccctagccaaactgtcaaa

SEQ ID NO: 71247 - DNA, 20 bp, synthetic construct
  misc_feature 1..20: note = Description of Artificial Sequence: Synthetic oligonucleotide
  misc_feature 1..20: note = Target: SCN10A; (+) strand; PAM type: YTN; PAM sequence: TTT
  source 1..20: mol_type = other DNA
ccctagccaaactgtcaaag

SEQ ID NO: 71248 - DNA, 20 bp, synthetic construct
  misc_feature 1..20: note = Description of Artificial Sequence: Synthetic oligonucleotide
  misc_feature 1..20: note = Target: SCN10A; (+) strand; PAM type: YTN; PAM sequence: TTC
  source 1..20: mol_type = other DNA
cctagccaaactgtcaaaga

SEQ ID NO: 71249 - DNA, 20 bp, synthetic construct
  misc_feature 1..20: note = Description of Artificial Sequence: Synthetic oligonucleotide
  misc_feature 1..20: note = Target: SCN10A; (+) strand; PAM type: YTN; PAM sequence: CTA
  source 1..20: mol_type = other DNA
gccaaactgtcaaagaaggt

SEQ ID NO: 71250 - DNA, 20 bp, synthetic construct
  misc_feature 1..20: note = Description of Artificial Sequence: Synthetic oligonucleotide
  misc_feature 1..20: note = Target: SCN10A; (+) strand; PAM type: YTN; PAM sequence: CTG
  source 1..20: mol_type = other DNA
tcaaagaaggtagaatatat

SEQ ID NO: 71251 - DNA, 20 bp, synthetic construct
  misc_feature 1..20: note = Description of Artificial Sequence: Synthetic oligonucleotide
  misc_feature 1..20: note = Target: SCN10A; (+) strand; PAM type: YTN; PAM sequence: CTT
  source 1..20: mol_type = other DNA
gggaaatgtacttcttagtt

SEQ ID NO: 71252 - DNA, 20 bp, synthetic construct
  misc_feature 1..20: note = Description of Artificial Sequence: Synthetic oligonucleotide
  misc_feature 1..20: note = Target: SCN10A; (+) strand; PAM type: YTN; PAM sequence: TTG
  source 1..20: mol_type = other DNA
ggaaatgtacttcttagtta

SEQ ID NO: 71253 - DNA, 20 bp, synthetic construct
  misc_feature 1..20: note = Description of Artificial Sequence: Synthetic oligonucleotide
  misc_feature 1..20: note = Target: SCN10A; (+) strand; PAM type: YTN; PAM sequence: CTT
  source 1..20: mol_type = other DNA
cttagttacccttctaataa

SEQ ID NO: 71254 - DNA, 20 bp, synthetic construct
  misc_feature 1..20: note = Description of Artificial Sequence: Synthetic oligonucleotide
  misc_feature 1..20: note = Target: SCN10A; (+) strand; PAM type: YTN; PAM sequence: TTC
  source 1..20: mol_type = other DNA
ttagttacccttctaataaa

SEQ ID NO: 71255 - DNA, 20 bp, synthetic construct
  misc_feature 1..20: note = Description of Artificial Sequence: Synthetic oligonucleotide
  misc_feature 1..20: note = Target: SCN10A; (+) strand; PAM type: YTN; PAM sequence: CTT
  source 1..20: mol_type = other DNA
agttacccttctaataaagt

SEQ ID NO: 71256 - DNA, 20 bp, synthetic construct
  misc_feature 1..20: note = Description of Artificial Sequence: Synthetic oligonucleotide
  misc_feature 1..20: note = Target: SCN10A; (+) strand; PAM type: YTN; PAM sequence: TTA
  source 1..20: mol_type = other DNA
gttacccttctaataaagtt

SEQ ID NO: 71257 - DNA, 20 bp, synthetic construct
  misc_feature 1..20: note = Description of Artificial Sequence: Synthetic oligonucleotide
  misc_feature 1..20: note = Target: SCN10A; (+) strand; PAM type: YTN; PAM sequence: TTA
  source 1..20: mol_type = other DNA
cccttctaataaagttacta

SEQ ID NO: 71258 - DNA, 20 bp, synthetic construct
  misc_feature 1..20: note = Description of Artificial Sequence: Synthetic oligonucleotide
  misc_feature 1..20: note = Target: SCN10A; (+) strand; PAM type: YTN; PAM sequence: CTT
  source 1..20: mol_type = other DNA
ctaataaagttactagaagc

SEQ ID NO: 71259 - DNA, 20 bp, synthetic construct
  misc_feature 1..20: note = Description of Artificial Sequence: Synthetic oligonucleotide
  misc_feature 1..20: note = Target: SCN10A; (+) strand; PAM type: YTN; PAM sequence: TTC
  source 1..20: mol_type = other DNA
taataaagttactagaagct

SEQ ID NO: 71260 - DNA, 20 bp, synthetic construct
  misc_feature 1..20: note = Description of Artificial Sequence: Synthetic oligonucleotide
  misc_feature 1..20: note = Target: SCN10A; (+) strand; PAM type: YTN; PAM sequence: CTA
  source 1..20: mol_type = other DNA
ataaagttactagaagctgg

SEQ ID NO: 71261 - DNA, 20 bp, synthetic construct
  misc_feature 1..20: note = Description of Artificial Sequence: Synthetic oligonucleotide
  misc_feature 1..20: note = Target: SCN10A; (+) strand; PAM type: YTN; PAM sequence: TTA
  source 1..20: mol_type = other DNA
ctagaagctgggcatggtgg

SEQ ID NO: 71262 - DNA, 20 bp, synthetic construct
  misc_feature 1..20: note = Description of Artificial Sequence: Synthetic oligonucleotide
  misc_feature 1..20: note = Target: SCN10A; (+) strand; PAM type: YTN; PAM sequence: CTA
  source 1..20: mol_type = other DNA
gaagctgggcatggtggtat

SEQ ID NO: 71263 - DNA, 20 bp, synthetic construct
  misc_feature 1..20: note = Description of Artificial Sequence: Synthetic oligonucleotide
  misc_feature 1..20: note = Target: SCN10A; (+) strand; PAM type: YTN; PAM sequence: CTG
  source 1..20: mol_type = other DNA
ggcatggtggtatgtacctg

SEQ ID NO: 71264 - DNA, 20 bp, synthetic construct
  misc_feature 1..20: note = Description of Artificial Sequence: Synthetic oligonucleotide
  misc_feature 1..20: note = Target: SCN10A; (+) strand; PAM type: YTN; PAM sequence: CTG
  source 1..20: mol_type = other DNA
tagtcctaactacttgggag

SEQ ID NO: 71265 - DNA, 20 bp, synthetic construct
  misc_feature 1..20: note = Description of Artificial Sequence: Synthetic oligonucleotide
  misc_feature 1..20: note = Target: SCN10A; (+) strand; PAM type: YTN; PAM sequence: CTA
  source 1..20: mol_type = other DNA
actacttgggaggttgaggc

SEQ ID NO: 71266 - DNA, 20 bp, synthetic construct
  misc_feature 1..20: note = Description of Artificial Sequence: Synthetic oligonucleotide
  misc_feature 1..20: note = Target: SCN10A; (+) strand; PAM type: YTN; PAM sequence: CTA
  source 1..20: mol_type = other DNA
cttgggaggttgaggcagga

SEQ ID NO: 71267 - DNA, 20 bp, synthetic construct
  misc_feature 1..20: note = Description of Artificial Sequence: Synthetic oligonucleotide
  misc_feature 1..20: note = Target: SCN10A; (+) strand; PAM type: YTN; PAM sequence: CTT
  source 1..20: mol_type = other DNA
gggaggttgaggcaggagga

SEQ ID NO: 71268 - DNA, 20 bp, synthetic construct
  misc_feature 1..20: note = Description of Artificial Sequence: Synthetic oligonucleotide
  misc_feature 1..20: note = Target: SCN10A; (+) strand; PAM type: YTN; PAM sequence: TTG
  source 1..20: mol_type = other DNA
ggaggttgaggcaggaggat

SEQ ID NO: 71269 - DNA, 20 bp, synthetic construct
  misc_feature 1..20: note = Description of Artificial Sequence: Synthetic oligonucleotide
  misc_feature 1..20: note = Target: SCN10A; (+) strand; PAM type: YTN; PAM sequence: TTG
  source 1..20: mol_type = other DNA
aggcaggaggatcacttgaa

SEQ ID NO: 71270 - DNA, 20 bp, synthetic construct
  misc_feature 1..20: note = Description of Artificial Sequence: Synthetic oligonucleotide
  misc_feature 1..20: note = Target: SCN10A; (+) strand; PAM type: YTN; PAM sequence: CTT
  source 1..20: mol_type = other DNA
gaacccaggagtttgaggcc

SEQ ID NO: 71271 - DNA, 20 bp, synthetic construct
  misc_feature 1..20: note = Description of Artificial Sequence: Synthetic oligonucleotide
  misc_feature 1..20: note = Target: SCN10A; (+) strand; PAM type: YTN; PAM sequence: TTG
  source 1..20: mol_type = other DNA
aacccaggagtttgaggcca

SEQ ID NO: 71272 - DNA, 20 bp, synthetic construct
  misc_feature 1..20: note = Description of Artificial Sequence: Synthetic oligonucleotide
  misc_feature 1..20: note = Target: SCN10A; (+) strand; PAM type: YTN; PAM sequence: TTT
  source 1..20: mol_type = other DNA
gaggccaacagcctgggcag

SEQ ID NO: 71273 - DNA, 20 bp, synthetic construct
  misc_feature 1..20: note = Description of Artificial Sequence: Synthetic oligonucleotide
  misc_feature 1..20: note = Target: SCN10A; (+) strand; PAM type: YTN; PAM sequence: TTG
  source 1..20: mol_type = other DNA
aggccaacagcctgggcagc

SEQ ID NO: 71274 - DNA, 20 bp, synthetic construct
  misc_feature 1..20: note = Description of Artificial Sequence: Synthetic oligonucleotide
  misc_feature 1..20: note = Target: SCN10A; (+) strand; PAM type: YTN; PAM sequence: CTG
  source 1..20: mol_type = other DNA
ggcagcatagagagactttg

SEQ ID NO: 71275 - DNA, 20 bp, synthetic construct
  misc_feature 1..20: note = Description of Artificial Sequence: Synthetic oligonucleotide
  misc_feature 1..20: note = Target: SCN10A; (+) strand; PAM type: YTN; PAM sequence: CTT
  source 1..20: mol_type = other DNA
tgtcttaaaaaaaaatgtta

SEQ ID NO: 71276 - DNA, 20 bp, synthetic construct
  misc_feature 1..20: note = Description of Artificial Sequence: Synthetic oligonucleotide
  misc_feature 1..20: note = Target: SCN10A; (+) strand; PAM type: YTN; PAM sequence: TTT
  source 1..20: mol_type = other DNA
gtcttaaaaaaaaatgttac

SEQ ID NO: 71277 - DNA, 20 bp, synthetic construct
  misc_feature 1..20: note = Description of Artificial Sequence: Synthetic oligonucleotide
  misc_feature 1..20: note = Target: SCN10A; (+) strand; PAM type: YTN; PAM sequence: TTG
  source 1..20: mol_type = other DNA
tcttaaaaaaaaatgttact

SEQ ID NO: 71278 - DNA, 20 bp, synthetic construct
  misc_feature 1..20: note = Description of Artificial Sequence: Synthetic oligonucleotide
  misc_feature 1..20: note = Target: SCN10A; (+) strand; PAM type: YTN; PAM sequence: CTT
  source 1..20: mol_type = other DNA
aaaaaaaaatgttactagag

SEQ ID NO: 71279 - DNA, 20 bp, synthetic construct
  misc_feature 1..20: note = Description of Artificial Sequence: Synthetic oligonucleotide
  misc_feature 1..20: note = Target: SCN10A; (+) strand; PAM type: YTN; PAM sequence: TTA
  source 1..20: mol_type = other DNA
aaaaaaaatgttactagagg

SEQ ID NO: 71280 - DNA, 20 bp, synthetic construct
  misc_feature 1..20: note = Description of Artificial Sequence: Synthetic oligonucleotide
  misc_feature 1..20: note = Target: SCN10A; (+) strand; PAM type: YTN; PAM sequence: TTA
  source 1..20: mol_type = other DNA
ctagaggatatgctccattc

SEQ ID NO: 71281 - DNA, 20 bp, synthetic construct
  misc_feature 1..20: note = Description of Artificial Sequence: Synthetic oligonucleotide
  misc_feature 1..20: note = Target: SCN10A; (+) strand; PAM type: YTN; PAM sequence: CTA
  source 1..20: mol_type = other DNA
gaggatatgctccattcaaa

SEQ ID NO: 71282 - DNA, 20 bp, synthetic construct
  misc_feature 1..20: note = Description of Artificial Sequence: Synthetic oligonucleotide
  misc_feature 1..20: note = Target: SCN10A; (+) strand; PAM type: YTN; PAM sequence: CTC
  source 1..20: mol_type = other DNA
cattcaaacaagaaacatat

SEQ ID NO: 71283 - DNA, 20 bp, synthetic construct
  misc_feature 1..20: note = Description of Artificial Sequence: Synthetic oligonucleotide
  misc_feature 1..20: note = Target: SCN10A; (+) strand; PAM type: YTN; PAM sequence: TTC
  source 1..20: mol_type = other DNA
aaacaagaaacatatatgcg

SEQ ID NO: 71284 - DNA, 20 bp, synthetic construct
  misc_feature 1..20: note = Description of Artificial Sequence: Synthetic oligonucleotide
  misc_feature 1..20: note = Target: SCN10A; (+) strand; PAM type: YTN; PAM sequence: CTC
  source 1..20: mol_type = other DNA
tagaaaacagctgtgcatca

SEQ ID NO: 71285 - DNA, 20 bp, synthetic construct
  misc_feature 1..20: note = Description of Artificial Sequence: Synthetic oligonucleotide
  misc_feature 1..20: note = Target: SCN10A; (+) strand; PAM type: YTN; PAM sequence: CTA
  source 1..20: mol_type = other DNA
gaaaacagctgtgcatcagg

SEQ ID NO: 71286 - DNA, 20 bp, synthetic construct
  misc_feature 1..20: note = Description of Artificial Sequence: Synthetic oligonucleotide
  misc_feature 1..20: note = Target: SCN10A; (+) strand; PAM type: YTN; PAM sequence: CTG
  source 1..20: mol_type = other DNA
tgcatcaggcctagaaaaca

SEQ ID NO: 71287 - DNA, 20 bp, synthetic construct
  misc_feature 1..20: note = Description of Artificial Sequence: Synthetic oligonucleotide
  misc_feature 1..20: note = Target: SCN10A; (+) strand; PAM type: YTN; PAM sequence: CTA
  source 1..20: mol_type = other DNA
gaaaacatctaggtcagaat

SEQ ID NO: 71288 - DNA, 20 bp, synthetic construct
  misc_feature 1..20: note = Description of Artificial Sequence: Synthetic oligonucleotide
  misc_feature 1..20: note = Target: SCN10A; (+) strand; PAM type: YTN; PAM sequence: CTA
  source 1..20: mol_type = other DNA
ggtcagaatgaggcagaaga

SEQ ID NO: 71289 - DNA, 20 bp, synthetic construct
  misc_feature 1..20: note = Description of Artificial Sequence: Synthetic oligonucleotide
  misc_feature 1..20: note = Target: SCN10A; (+) strand; PAM type: YTN; PAM sequence: CTC
  source 1..20: mol_type = other DNA
tagctgtgattcccatagga

SEQ ID NO: 71290 - DNA, 20 bp, synthetic construct
  misc_feature 1..20: note = Description of Artificial Sequence: Synthetic oligonucleotide
  misc_feature 1..20: note = Target: SCN10A; (+) strand; PAM type: YTN; PAM sequence: CTA
  source 1..20: mol_type = other DNA
gctgtgattcccataggaaa

SEQ ID NO: 71291 - DNA, 20 bp, synthetic construct
  misc_feature 1..20: note = Description of Artificial Sequence: Synthetic oligonucleotide
  misc_feature 1..20: note = Target: SCN10A; (+) strand; PAM type: YTN; PAM sequence: CTG
  source 1..20: mol_type = other DNA
tgattcccataggaaaaaaa

SEQ ID NO: 71292 - DNA, 20 bp, synthetic construct
  misc_feature 1..20: note = Description of Artificial Sequence: Synthetic oligonucleotide
  misc_feature 1..20: note = Target: SCN10A; (+) strand; PAM type: YTN; PAM sequence: TTC
  source 1..20: mol_type = other DNA
ccataggaaaaaaatgatac

SEQ ID NO: 71293 - DNA, 20 bp, synthetic construct
  misc_feature 1..20: note = Description of Artificial Sequence: Synthetic oligonucleotide
  misc_feature 1..20: note = Target: SCN10A; (+) strand; PAM type: YTN; PAM sequence: CTG
  source 1..20: mol_type = other DNA
atgtgtgcaaataaattgaa

SEQ ID NO: 71294 - DNA, 20 bp, synthetic construct
  misc_feature 1..20: note = Description of Artificial Sequence: Synthetic oligonucleotide
  misc_feature 1..20: note = Target: SCN10A; (+) strand; PAM type: YTN; PAM sequence: TTG
  source 1..20: mol_type = other DNA
aagcaacaattaaacatctg

SEQ ID NO: 71295 - DNA, 20 bp, synthetic construct
  misc_feature 1..20: note = Description of Artificial Sequence: Synthetic oligonucleotide
  misc_feature 1..20: note = Target: SCN10A; (+) strand; PAM type: YTN; PAM sequence: TTA
  source 1..20: mol_type = other DNA
aacatctggagaagagtttg

SEQ ID NO: 71296 - DNA, 20 bp, synthetic construct
  misc_feature 1..20: note = Description of Artificial Sequence: Synthetic oligonucleotide
  misc_feature 1..20: note = Target: SCN10A; (+) strand; PAM type: YTN; PAM sequence: CTG
  source 1..20: mol_type = other DNA
gagaagagtttgggaacaaa

SEQ ID NO: 71297 - DNA, 20 bp, synthetic construct
  misc_feature 1..20: note = Description of Artificial Sequence: Synthetic oligonucleotide
  misc_feature 1..20: note = Target: SCN10A; (+) strand; PAM type: YTN; PAM sequence: TTT
  source 1..20: mol_type = other DNA
gggaacaaattagggataaa

SEQ ID NO: 71298 - DNA, 20 bp, synthetic construct
  misc_feature 1..20: note = Description of Artificial Sequence: Synthetic oligonucleotide
  misc_feature 1..20: note = Target: SCN10A; (+) strand; PAM type: YTN; PAM sequence: TTG
  source 1..20: mol_type = other DNA
ggaacaaattagggataaat

SEQ ID NO: 71299 - DNA, 20 bp, synthetic construct
  misc_feature 1..20: note = Description of Artificial Sequence: Synthetic oligonucleotide
  misc_feature 1..20: note = Target: SCN10A; (+) strand; PAM type: YTN; PAM sequence: TTA
  source 1..20: mol_type = other DNA
gggataaatagaaaactgag

SEQ ID NO: 71300 - DNA, 20 bp, synthetic construct
  misc_feature 1..20: note = Description of Artificial Sequence: Synthetic oligonucleotide
  misc_feature 1..20: note = Target: SCN10A; (+) strand; PAM type: YTN; PAM sequence: CTG
  source 1..20: mol_type = other DNA
agcaaacaaaaaaataaaat

SEQ ID NO: 71301 - DNA, 20 bp, synthetic construct
  misc_feature 1..20: note = Description of Artificial Sequence: Synthetic oligonucleotide
  misc_feature 1..20: note = Target: SCN10A; (+) strand; PAM type: YTN; PAM sequence: CTT
  source 1..20: mol_type = other DNA
attaactccaaggaaagcaa

SEQ ID NO: 71302 - DNA, 20 bp, synthetic construct
  misc_feature 1..20: note = Description of Artificial Sequence: Synthetic oligonucleotide
  misc_feature 1..20: note = Target: SCN10A; (+) strand; PAM type: YTN; PAM sequence: TTA
  source 1..20: mol_type = other DNA
ttaactccaaggaaagcaaa

SEQ ID NO: 71303 - DNA, 20 bp, synthetic construct
  misc_feature 1..20: note = Description of Artificial Sequence: Synthetic oligonucleotide
  misc_feature 1..20: note = Target: SCN10A; (+) strand; PAM type: YTN; PAM sequence: TTA
  source 1..20: mol_type = other DNA
actccaaggaaagcaaaaac

SEQ ID NO: 71304 - DNA, 20 bp, synthetic construct
  misc_feature 1..20: note = Description of Artificial Sequence: Synthetic oligonucleotide
  misc_feature 1..20: note = Target: SCN10A; (+) strand; PAM type: YTN; PAM sequence: CTC
  source 1..20: mol_type = other DNA
caaggaaagcaaaaacattg

SEQ ID NO: 71305 - DNA, 20 bp, synthetic construct
  misc_feature 1..20: note = Description of Artificial Sequence: Synthetic oligonucleotide
  misc_feature 1..20: note = Target: SCN10A; (+) strand; PAM type: YTN; PAM sequence: TTG
  source 1..20: mol_type = other DNA
tgcaaaaaggaaatatagtc

SEQ ID NO: 71306 - DNA, 20 bp, synthetic construct
  misc_feature 1..20: note = Description of Artificial Sequence: Synthetic oligonucleotide
  misc_feature 1..20: note = Target: SCN10A; (+) strand; PAM type: YTN; PAM sequence: CTG
  source 1..20: mol_type = other DNA
catgacacagctgtaaacag

SEQ ID NO: 71307 - DNA, 20 bp, synthetic construct
  misc_feature 1..20: note = Description of Artificial Sequence: Synthetic oligonucleotide
  misc_feature 1..20: note = Target: SCN10A; (+) strand; PAM type: YTN; PAM sequence: CTG
  source 1..20: mol_type = other DNA
taaacagtgtttacttagca

SEQ ID NO: 71308 - DNA, 20 bp, synthetic construct
  misc_feature 1..20: note = Description of Artificial Sequence: Synthetic oligonucleotide
  misc_feature 1..20: note = Target: SCN10A; (+) strand; PAM type: YTN; PAM sequence: TTT
  source 1..20: mol_type = other DNA
acttagcaatgtaatgtaat

SEQ ID NO: 71309 - DNA, 20 bp, synthetic construct
  misc_feature 1..20: note = Description of Artificial Sequence: Synthetic oligonucleotide
  misc_feature 1..20: note = Target: SCN10A; (+) strand; PAM type: YTN; PAM sequence: TTA
  source 1..20: mol_type = other DNA
cttagcaatgtaatgtaatt

SEQ ID NO: 71310 - DNA, 20 bp, synthetic construct
  misc_feature 1..20: note = Description of Artificial Sequence: Synthetic oligonucleotide
  misc_feature 1..20: note = Target: SCN10A; (+) strand; PAM type: YTN; PAM sequence: CTT
  source 1..20: mol_type = other DNA
agcaatgtaatgtaattata

SEQ ID NO: 71311 - DNA, 20 bp, synthetic construct
  misc_feature 1..20: note = Description of Artificial Sequence: Synthetic oligonucleotide
  misc_feature 1..20: note = Target: SCN10A; (+) strand; PAM type: YTN; PAM sequence: TTA
  source 1..20: mol_type = other DNA
gcaatgtaatgtaattatat

SEQ ID NO: 71312 - DNA, 20 bp, synthetic construct
  misc_feature 1..20: note = Description of Artificial Sequence: Synthetic oligonucleotide
  misc_feature 1..20: note = Target: SCN10A; (+) strand; PAM type: YTN; PAM sequence: TTA
  source 1..20: mol_type = other DNA
tatatgtagtcatacaatgg

SEQ ID NO: 71313 - DNA, 20 bp, synthetic construct
  misc_feature 1..20: note = Description of Artificial Sequence: Synthetic oligonucleotide
  misc_feature 1..20: note = Target: SCN10A; (+) strand; PAM type: YTN; PAM sequence: TTA
  source 1..20: mol_type = other DNA
tctgatgatctaactgaaga

SEQ ID NO: 71314 - DNA, 20 bp, synthetic construct
  misc_feature 1..20: note = Description of Artificial Sequence: Synthetic oligonucleotide
  misc_feature 1..20: note = Target: SCN10A; (+) strand; PAM type: YTN; PAM sequence: CTG
  source 1..20: mol_type = other DNA
atgatctaactgaagattac

SEQ ID NO: 71315 - DNA, 20 bp, synthetic construct
  misc_feature 1..20: note = Description of Artificial Sequence: Synthetic oligonucleotide
  misc_feature 1..20: note = Target: SCN10A; (+) strand; PAM type: YTN; PAM sequence: CTA
  source 1..20: mol_type = other DNA
actgaagattacaatataac

SEQ ID NO: 71316 - DNA, 20 bp, synthetic construct
  misc_feature 1..20: note = Description of Artificial Sequence: Synthetic oligonucleotide
  misc_feature 1..20: note = Target: SCN10A; (+) strand; PAM type: YTN; PAM sequence: CTG
  source 1..20: mol_type = other DNA
aagattacaatataactgta

SEQ ID NO: 71317 - DNA, 20 bp, synthetic construct
  misc_feature 1..20: note = Description of Artificial Sequence: Synthetic oligonucleotide
  misc_feature 1..20: note = Target: SCN10A; (+) strand; PAM type: YTN; PAM sequence: TTA
  source 1..20: mol_type = other DNA
caatataactgtaacaggaa

SEQ ID NO: 71318 - DNA, 20 bp, synthetic construct
  misc_feature 1..20: note = Description of Artificial Sequence: Synthetic oligonucleotide
  misc_feature 1..20: note = Target: SCN10A; (+) strand; PAM type: YTN; PAM sequence: CTG
  source 1..20: mol_type = other DNA
taacaggaagatgagggtga

SEQ ID NO: 71319 - DNA, 20 bp, synthetic construct
  misc_feature 1..20: note = Description of Artificial Sequence: Synthetic oligonucleotide
  misc_feature 1..20: note = Target: SCN10A; (+) strand; PAM type: YTN; PAM sequence: TTT
  source 1..20: mol_type = other DNA
gtggatgtggccttaagttt

SEQ ID NO: 71320 - DNA, 20 bp, synthetic construct
  misc_feature 1..20: note = Description of Artificial Sequence: Synthetic oligonucleotide
  misc_feature 1..20: note = Target: SCN10A; (+) strand; PAM type: YTN; PAM sequence: TTG
  source 1..20: mol_type = other DNA
tggatgtggccttaagtttt

SEQ ID NO: 71321 - DNA, 20 bp, synthetic construct
  misc_feature 1..20: note = Description of Artificial Sequence: Synthetic oligonucleotide
  misc_feature 1..20: note = Target: SCN10A; (+) strand; PAM type: YTN; PAM sequence: CTT
  source 1..20: mol_type = other DNA
aagttttttctcataatagg

SEQ ID NO: 71322 - DNA, 20 bp, synthetic construct
  misc_feature 1..20: note = Description of Artificial Sequence: Synthetic oligonucleotide
  misc_feature 1..20: note = Target: SCN10A; (+) strand; PAM type: YTN; PAM sequence: TTA
  source 1..20: mol_type = other DNA
agttttttctcataatagga

SEQ ID NO: 71323 - DNA, 20 bp, synthetic construct
  misc_feature 1..20: note = Description of Artificial Sequence: Synthetic oligonucleotide
  misc_feature 1..20: note = Target: SCN10A; (+) strand; PAM type: YTN; PAM sequence: TTT
  source 1..20: mol_type = other DNA
tttctcataataggaagcca

SEQ ID NO: 71324 - DNA, 20 bp, synthetic construct
  misc_feature 1..20: note = Description of Artificial Sequence: Synthetic oligonucleotide
  misc_feature 1..20: note = Target: SCN10A; (+) strand; PAM type: YTN; PAM sequence: TTT
  source 1..20: mol_type = other DNA
ttctcataataggaagccaa

SEQ ID NO: 71325 - DNA, 20 bp, synthetic construct
  misc_feature 1..20: note = Description of Artificial Sequence: Synthetic oligonucleotide
  misc_feature 1..20: note = Target: SCN10A; (+) strand; PAM type: YTN; PAM sequence: TTT
  source 1..20: mol_type = other DNA
tctcataataggaagccaat

SEQ ID NO: 71326 - DNA, 20 bp, synthetic construct
  misc_feature 1..20: note = Description of Artificial Sequence: Synthetic oligonucleotide
  misc_feature 1..20: note = Target: SCN10A; (+) strand; PAM type: YTN; PAM sequence: TTT
  source 1..20: mol_type = other DNA
ctcataataggaagccaata

SEQ ID NO: 71327 - DNA, 20 bp, synthetic construct
  misc_feature 1..20: note = Description of Artificial Sequence: Synthetic oligonucleotide
  misc_feature 1..20: note = Target: SCN10A; (+) strand; PAM type: YTN; PAM sequence: TTC
  source 1..20: mol_type = other DNA
tcataataggaagccaataa

SEQ ID NO: 71328 - DNA, 20 bp, synthetic construct
  misc_feature 1..20: note = Description of Artificial Sequence: Synthetic oligonucleotide
  misc_feature 1..20: note = Target: SCN10A; (+) strand; PAM type: YTN; PAM sequence: CTC
  source 1..20: mol_type = other DNA
ataataggaagccaataaat

SEQ ID NO: 71329 - DNA, 20 bp, synthetic construct
  misc_feature 1..20: note = Description of Artificial Sequence: Synthetic oligonucleotide
  misc_feature 1..20: note = Target: SCN10A; (+) strand; PAM type: YTN; PAM sequence: TTG
  source 1..20: mol_type = other DNA
aaaaattaaaaattagtatt

SEQ ID NO: 71330 - DNA, 20 bp, synthetic construct
  misc_feature 1..20: note = Description of Artificial Sequence: Synthetic oligonucleotide
  misc_feature 1..20: note = Target: SCN10A; (+) strand; PAM type: YTN; PAM sequence: TTA
  source 1..20: mol_type = other DNA
aaaattagtattatgagtat

SEQ ID NO: 71331 - DNA, 20 bp, synthetic construct
  misc_feature 1..20: note = Description of Artificial Sequence: Synthetic oligonucleotide
  misc_feature 1..20: note = Target: SCN10A; (+) strand; PAM type: YTN; PAM sequence: TTA
  source 1..20: mol_type = other DNA
gtattatgagtatattattg

SEQ ID NO: 71332 - DNA, 20 bp, synthetic construct
  misc_feature 1..20: note = Description of Artificial Sequence: Synthetic oligonucleotide
  misc_feature 1..20: note = Target: SCN10A; (+) strand; PAM type: YTN; PAM sequence: TTA
  source 1..20: mol_type = other DNA
tgagtatattattggagata

SEQ ID NO: 71333 - DNA, 20 bp, synthetic construct
  misc_feature 1..20: note = Description of Artificial Sequence: Synthetic oligonucleotide
  misc_feature 1..20: note = Target: SCN10A; (+) strand; PAM type: YTN; PAM sequence: TTA
  source 1..20: mol_type = other DNA
ttggagatagggaggtatca

SEQ ID NO: 71334 - DNA, 20 bp, synthetic construct
  misc_feature 1..20: note = Description of Artificial Sequence: Synthetic oligonucleotide
  misc_feature 1..20: note = Target: SCN10A; (+) strand; PAM type: YTN; PAM sequence: TTG
  source 1..20: mol_type = other DNA
gagatagggaggtatcagaa

SEQ ID NO: 71335 - DNA, 20 bp, synthetic construct
  misc_feature 1..20: note = Description of Artificial Sequence: Synthetic oligonucleotide
  misc_feature 1..20: note = Target: SCN10A; (+) strand; PAM type: YTN; PAM sequence: CTA
  source 1..20: mol_type = other DNA
aaagtggtggcctctggaaa

SEQ ID NO: 71336 - DNA, 20 bp, synthetic construct
  misc_feature 1..20: note = Description of Artificial Sequence: Synthetic oligonucleotide
  misc_feature 1..20: note = Target: SCN10A; (+) strand; PAM type: YTN; PAM sequence: CTC
  source 1..20: mol_type = other DNA
tggaaagaagagatgagaaa

SEQ ID NO: 71337 - DNA, 20 bp, synthetic construct
  misc_feature 1..20: note = Description of Artificial Sequence: Synthetic oligonucleotide
  misc_feature 1..20: note = Target: SCN10A; (+) strand; PAM type: YTN; PAM sequence: CTG
  source 1..20: mol_type = other DNA
gaaagaagagatgagaaaaa

SEQ ID NO: 71338 - DNA, 20 bp, synthetic construct
  misc_feature 1..20: note = Description of Artificial Sequence: Synthetic oligonucleotide
  misc_feature 1..20: note = Target: SCN10A; (+) strand; PAM type: YTN; PAM sequence: TTG
  source 1..20: mol_type = other DNA
ctgttttttttgtcagaatc

SEQ ID NO: 71339 - DNA, 20 bp, synthetic construct
  misc_feature 1..20: note = Description of Artificial Sequence: Synthetic oligonucleotide
  misc_feature 1..20: note = Target: SCN10A; (+) strand; PAM type: YTN; PAM sequence: CTG
  source 1..20: mol_type = other DNA
ttttttttgtcagaatcttt

SEQ ID NO: 71340 - DNA, 20 bp, synthetic construct
  misc_feature 1..20: note = Description of Artificial Sequence: Synthetic oligonucleotide
  misc_feature 1..20: note = Target: SCN10A; (+) strand; PAM type: YTN; PAM sequence: TTT
  source 1..20: mol_type = other DNA
tttttgtcagaatctttata

SEQ ID NO: 71341 - DNA, 20 bp, synthetic construct
  misc_feature 1..20: note = Description of Artificial Sequence: Synthetic oligonucleotide
  misc_feature 1..20: note = Target: SCN10A; (+) strand; PAM type: YTN; PAM sequence: TTT
  source 1..20: mol_type = other DNA
ttttgtcagaatctttataa

SEQ ID NO: 71342 - DNA, 20 bp, synthetic construct
  misc_feature 1..20: note = Description of Artificial Sequence: Synthetic oligonucleotide
  misc_feature 1..20: note = Target: SCN10A; (+) strand; PAM type: YTN; PAM sequence: TTT
  source 1..20: mol_type = other DNA
tttgtcagaatctttataaa

SEQ ID NO: 71343 - DNA, 20 bp, synthetic construct
  misc_feature 1..20: note = Description of Artificial Sequence: Synthetic oligonucleotide
  misc_feature 1..20: note = Target: SCN10A; (+) strand; PAM type: YTN; PAM sequence: TTT
  source 1..20: mol_type = other DNA
ttgtcagaatctttataaaa

SEQ ID NO: 71344 - DNA, 20 bp, synthetic construct
  misc_feature 1..20: note = Description of Artificial Sequence: Synthetic oligonucleotide
  misc_feature 1..20: note = Target: SCN10A; (+) strand; PAM type: YTN; PAM sequence: TTT
  source 1..20: mol_type = other DNA
tgtcagaatctttataaaac

SEQ ID NO: 71345 - DNA, 20 bp, synthetic construct
  misc_feature 1..20: note = Description of Artificial Sequence: Synthetic oligonucleotide
  misc_feature 1..20: note = Target: SCN10A; (+) strand; PAM type: YTN; PAM sequence: TTT
  source 1..20: mol_type = other DNA
gtcagaatctttataaaact

SEQ ID NO: 71346 - DNA, 20 bp, synthetic construct
  misc_feature 1..20: note = Description of Artificial Sequence: Synthetic oligonucleotide
  misc_feature 1..20: note = Target: SCN10A; (+) strand; PAM type: YTN; PAM sequence: TTG
  source 1..20: mol_type = other DNA
tcagaatctttataaaactc

SEQ ID NO: 71347 - DNA, 20 bp, synthetic construct
  misc_feature 1..20: note = Description of Artificial Sequence: Synthetic oligonucleotide
  misc_feature 1..20: note = Target: SCN10A; (+) strand; PAM type: YTN; PAM sequence: CTT
  source 1..20: mol_type = other DNA
tataaaactctgtgaccttt

SEQ ID NO: 71348 - DNA, 20 bp, synthetic construct
  misc_feature 1..20: note = Description of Artificial Sequence: Synthetic oligonucleotide
  misc_feature 1..20: note = Target: SCN10A; (+) strand; PAM type: YTN; PAM sequence: TTT
  source 1..20: mol_type = other DNA
ataaaactctgtgacctttt

SEQ ID NO: 71349 - DNA, 20 bp, synthetic construct
  misc_feature 1..20: note = Description of Artificial Sequence: Synthetic oligonucleotide
  misc_feature 1..20: note = Target: SCN10A; (+) strand; PAM type: YTN; PAM sequence: TTA
  source 1..20: mol_type = other DNA
taaaactctgtgacctttta

SEQ ID NO: 71350 - DNA, 20 bp, synthetic construct
  misc_feature 1..20: note = Description of Artificial Sequence: Synthetic oligonucleotide
  misc_feature 1..20: note = Target: SCN10A; (+) strand; PAM type: YTN; PAM sequence: CTC
  source 1..20: mol_type = other DNA
tgtgaccttttaaattatga

SEQ ID NO: 71351 - DNA, 20 bp, synthetic construct
  misc_feature 1..20: note = Description of Artificial Sequence: Synthetic oligonucleotide
  misc_feature 1..20: note = Target: SCN10A; (+) strand; PAM type: YTN; PAM sequence: CTG
  source 1..20: mol_type = other DNA
tgaccttttaaattatgaac

SEQ ID NO: 71352 - DNA, 20 bp, synthetic construct
  misc_feature 1..20: note = Description of Artificial Sequence: Synthetic oligonucleotide
  misc_feature 1..20: note = Target: SCN10A; (+) strand; PAM type: YTN; PAM sequence: CTT
  source 1..20: mol_type = other DNA
ttaaattatgaacatatatg

SEQ ID NO: 71353 - DNA, 20 bp, synthetic construct
  misc_feature 1..20: note = Description of Artificial Sequence: Synthetic oligonucleotide
  misc_feature 1..20: note = Target: SCN10A; (+) strand; PAM type: YTN; PAM sequence: TTT
  source 1..20: mol_type = other DNA
taaattatgaacatatatgt

SEQ ID NO: 71354 - DNA, 20 bp, synthetic construct
  misc_feature 1..20: note = Description of Artificial Sequence: Synthetic oligonucleotide
  misc_feature 1..20: note = Target: SCN10A; (+) strand; PAM type: YTN; PAM sequence: TTT
  source 1..20: mol_type = other DNA
aaattatgaacatatatgtc

SEQ ID NO: 71355 - DNA, 20 bp, synthetic construct
  misc_feature 1..20: note = Description of Artificial Sequence: Synthetic oligonucleotide
  misc_feature 1..20: note = Target: SCN10A; (+) strand; PAM type: YTN; PAM sequence: TTA
  source 1..20: mol_type = other DNA
aattatgaacatatatgtct

SEQ ID NO: 71356 - DNA, 20 bp, synthetic construct
  misc_feature 1..20: note = Description of Artificial Sequence: Synthetic oligonucleotide
  misc_feature 1..20: note = Target: SCN10A; (+) strand; PAM type: YTN; PAM sequence: TTA
  source 1..20: mol_type = other DNA
tgaacatatatgtcttaaat

SEQ ID NO: 71357 - DNA, 20 bp, synthetic construct
  misc_feature 1..20: note = Description of Artificial Sequence: Synthetic oligonucleotide
  misc_feature 1..20: note = Target: SCN10A; (+) strand; PAM type: YTN; PAM sequence: CTT
  source 1..20: mol_type = other DNA
aaataaaagtaaaagtcaag

SEQ ID NO: 71358 - DNA, 20 bp, synthetic construct
  misc_feature 1..20: note = Description of Artificial Sequence: Synthetic oligonucleotide
  misc_feature 1..20: note = Target: SCN10A; (+) strand; PAM type: YTN; PAM sequence: TTA
  source 1..20: mol_type = other DNA
aataaaagtaaaagtcaagt

SEQ ID NO: 71359 - DNA, 20 bp, synthetic construct
  misc_feature 1..20: note = Description of Artificial Sequence: Synthetic oligonucleotide
  misc_feature 1..20: note = Target: SCN10A; (+) strand; PAM type: YTN; PAM sequence: TTA
  source 1..20: mol_type = other DNA
aaaagtgaataatttttttt

SEQ ID NO: 71360 - DNA, 20 bp, synthetic construct
  misc_feature 1..20: note = Description of Artificial Sequence: Synthetic oligonucleotide
  misc_feature 1..20: note = Target: SCN10A; (+) strand; PAM type: YTN; PAM sequence: TTT
  source 1..20: mol_type = other DNA
tttttcacatctgtgagagg

SEQ ID NO: 71361 - DNA, 20 bp, synthetic construct
  misc_feature 1..20: note = Description of Artificial Sequence: Synthetic oligonucleotide
  misc_feature 1..20: note = Target: SCN10A; (+) strand; PAM type: YTN; PAM sequence: TTT
  source 1..20: mol_type = other DNA
ttttcacatctgtgagagga

SEQ ID NO: 71362 - DNA, 20 bp, synthetic construct
  misc_feature 1..20: note = Description of Artificial Sequence: Synthetic oligonucleotide
  misc_feature 1..20: note = Target: SCN10A; (+) strand; PAM type: YTN; PAM sequence: TTT
  source 1..20: mol_type = other DNA
tttcacatctgtgagaggag

SEQ ID NO: 71363 - DNA, 20 bp, synthetic construct
  misc_feature 1..20: note = Description of Artificial Sequence: Synthetic oligonucleotide
  misc_feature 1..20: note = Target: SCN10A; (+) strand; PAM type: YTN; PAM sequence: TTT
  source 1..20: mol_type = other DNA
ttcacatctgtgagaggaga

SEQ ID NO: 71364 - DNA, 20 bp, synthetic construct
  misc_feature 1..20: note = Description of Artificial Sequence: Synthetic oligonucleotide
  misc_feature 1..20: note = Target: SCN10A; (+) strand; PAM type: YTN; PAM sequence: TTT
  source 1..20: mol_type = other DNA
tcacatctgtgagaggagaa

SEQ ID NO: 71365 - DNA, 20 bp, synthetic construct
  misc_feature 1..20: note = Description of Artificial Sequence: Synthetic oligonucleotide
  misc_feature 1..20: note = Target: SCN10A; (+) strand; PAM type: YTN; PAM sequence: TTT
  source 1..20: mol_type = other DNA
cacatctgtgagaggagaaa

SEQ ID NO: 71366 - DNA, 20 bp, synthetic construct
  misc_feature 1..20: note = Description of Artificial Sequence: Synthetic oligonucleotide
  misc_feature 1..20: note = Target: SCN10A; (+) strand; PAM type: YTN; PAM sequence: TTC
  source 1..20: mol_type = other DNA
acatctgtgagaggagaaat

SEQ ID NO: 71367 - DNA, 20 bp, synthetic construct
  misc_feature 1..20: note = Description of Artificial Sequence: Synthetic oligonucleotide
  misc_feature 1..20: note = Target: SCN10A; (+) strand; PAM type: YTN; PAM sequence: CTG
  source 1..20: mol_type = other DNA
tgagaggagaaatcgtgttt

SEQ ID NO: 71368 - DNA, 20 bp, synthetic construct
  misc_feature 1..20: note = Description of Artificial Sequence: Synthetic oligonucleotide
  misc_feature 1..20: note = Target: SCN10A; (+) strand; PAM type: YTN; PAM sequence: TTT
  source 1..20: mol_type = other DNA
gaaatcatttaggaatctat

SEQ ID NO: 71369 - DNA, 20 bp, synthetic construct
  misc_feature 1..20: note = Description of Artificial Sequence: Synthetic oligonucleotide
  misc_feature 1..20: note = Target: SCN10A; (+) strand; PAM type: YTN; PAM sequence: TTG
  source 1..20: mol_type = other DNA
aaatcatttaggaatctata

SEQ ID NO: 71370 - DNA, 20 bp, synthetic construct
  misc_feature 1..20: note = Description of Artificial Sequence: Synthetic oligonucleotide
  misc_feature 1..20: note = Target: SCN10A; (+) strand; PAM type: YTN; PAM sequence: TTT
  source 1..20: mol_type = other DNA
aggaatctatatctggttgc

SEQ ID NO: 71371 - DNA, 20 bp, synthetic construct
  misc_feature 1..20: note = Description of Artificial Sequence: Synthetic oligonucleotide
  misc_feature 1..20: note = Target: SCN10A; (+) strand; PAM type: YTN; PAM sequence: TTA
  source 1..20: mol_type = other DNA
ggaatctatatctggttgca

SEQ ID NO: 71372 - DNA, 20 bp, synthetic construct
  misc_feature 1..20: note = Description of Artificial Sequence: Synthetic oligonucleotide
  misc_feature 1..20: note = Target: SCN10A; (+) strand; PAM type: YTN; PAM sequence: CTA
  source 1..20: mol_type = other DNA
tatctggttgcatagctgct

SEQ ID NO: 71373 - DNA, 20 bp, synthetic construct
  misc_feature 1..20: note = Description of Artificial Sequence: Synthetic oligonucleotide
  misc_feature 1..20: note = Target: SCN10A; (+) strand; PAM type: YTN; PAM sequence: CTG
  source 1..20: mol_type = other DNA
gttgcatagctgcttgagct

SEQ ID NO: 71374 - DNA, 20 bp, synthetic construct
  misc_feature 1..20: note = Description of Artificial Sequence: Synthetic oligonucleotide
  misc_feature 1..20: note = Target: SCN10A; (+) strand; PAM type: YTN; PAM sequence: TTG
  source 1..20: mol_type = other DNA
catagctgcttgagctgtca

SEQ ID NO: 71375 - DNA, 20 bp, synthetic construct
  misc_feature 1..20: note = Description of Artificial Sequence: Synthetic oligonucleotide
  misc_feature 1..20: note = Target: SCN10A; (+) strand; PAM type: YTN; PAM sequence: CTG
  source 1..20: mol_type = other DNA
cttgagctgtcagcttccat

SEQ ID NO: 71376 - DNA, 20 bp, synthetic construct
  misc_feature 1..20: note = Description of Artificial Sequence: Synthetic oligonucleotide
  misc_feature 1..20: note = Target: SCN10A; (+) strand; PAM type: YTN; PAM sequence: CTT
  source 1..20: mol_type = other DNA
gagctgtcagcttccatatc

SEQ ID NO: 71377 - DNA, 20 bp, synthetic construct
  misc_feature 1..20: note = Description of Artificial Sequence: Synthetic oligonucleotide
  misc_feature 1..20: note = Target: SCN10A; (+) strand; PAM type: YTN; PAM sequence: TTG
  source 1..20: mol_type = other DNA
agctgtcagcttccatatct

SEQ ID NO: 71378 - DNA, 20 bp, synthetic construct
  misc_feature 1..20: note = Description of Artificial Sequence: Synthetic oligonucleotide
  misc_feature 1..20: note = Target: SCN10A; (+) strand; PAM type: YTN; PAM sequence: CTG
  source 1..20: mol_type = other DNA
tcagcttccatatcttgttg

SEQ ID NO: 71379 - DNA, 20 bp, synthetic construct
  misc_feature 1..20: note = Description of Artificial Sequence: Synthetic oligonucleotide
  misc_feature 1..20: note = Target: SCN10A; (+) strand; PAM type: YTN; PAM sequence: CTT
  source 1..20: mol_type = other DNA
ccatatcttgttggtttccc

SEQ ID NO: 71380 - DNA, 20 bp, synthetic construct
  misc_feature 1..20: note = Description of Artificial Sequence: Synthetic oligonucleotide
  misc_feature 1..20: note = Target: SCN10A; (+) strand; PAM type: YTN; PAM sequence: TTC
  source 1..20: mol_type = other DNA
catatcttgttggtttcccc

SEQ ID NO: 71381 - DNA, 20 bp, synthetic construct
  misc_feature 1..20: note = Description of Artificial Sequence: Synthetic oligonucleotide
  misc_feature 1..20: note = Target: SCN10A; (+) strand; PAM type: YTN; PAM sequence: CTT
  source 1..20: mol_type = other DNA
gttggtttcccccccacact

SEQ ID NO: 71382 - DNA, 20 bp, synthetic construct
  misc_feature 1..20: note = Description of Artificial Sequence: Synthetic oligonucleotide
  misc_feature 1..20: note = Target: SCN10A; (+) strand; PAM type: YTN; PAM sequence: TTG
  source 1..20: mol_type = other DNA
ttggtttcccccccacactc

SEQ ID NO: 71383 - DNA, 20 bp, synthetic construct
  misc_feature 1..20: note = Description of Artificial Sequence: Synthetic oligonucleotide
  misc_feature 1..20: note = Target: SCN10A; (+) strand; PAM type: YTN; PAM sequence: TTG
  source 1..20: mol_type = other DNA
gtttcccccccacactcttt

SEQ ID NO: 71384 - DNA, 20 bp, synthetic construct
  misc_feature 1..20: note = Description of Artificial Sequence: Synthetic oligonucleotide
  misc_feature 1..20: note = Target: SCN10A; (+) strand; PAM type: YTN; PAM sequence: TTT
  source 1..20: mol_type = other DNA
cccccccacactctttatgt

SEQ ID NO: 71385 - DNA, 20 bp, synthetic construct
  misc_feature 1..20: note = Description of Artificial Sequence: Synthetic oligonucleotide
  misc_feature 1..20: note = Target: SCN10A; (+) strand; PAM type: YTN; PAM sequence: TTC
  source 1..20: mol_type = other DNA
ccccccacactctttatgtt

SEQ ID NO: 71386 - DNA, 20 bp, synthetic construct
  misc_feature 1..20: note = Description of Artificial Sequence: Synthetic oligonucleotide
  misc_feature 1..20: note = Target: SCN10A; (+) strand; PAM type: YTN; PAM sequence: CTC
  source 1..20: mol_type = other DNA
tttatgttttctaaattaga

SEQ ID NO: 71387 - DNA, 20 bp, synthetic construct
  misc_feature 1..20: note = Description of Artificial Sequence: Synthetic oligonucleotide
  misc_feature 1..20: note = Target: SCN10A; (+) strand; PAM type: YTN; PAM sequence: CTT
  source 1..20: mol_type = other DNA
tatgttttctaaattagaaa

SEQ ID NO: 71388 - DNA, 20 bp, synthetic construct
  misc_feature 1..20: note = Description of Artificial Sequence: Synthetic oligonucleotide
  misc_feature 1..20: note = Target: SCN10A; (+) strand; PAM type: YTN; PAM sequence: TTT
  source 1..20: mol_type = other DNA
atgttttctaaattagaaaa

SEQ ID NO: 71389 - DNA, 20 bp, synthetic construct
  misc_feature 1..20: note = Description of Artificial Sequence: Synthetic oligonucleotide
  misc_feature 1..20: note = Target: SCN10A; (+) strand; PAM type: YTN; PAM sequence: TTA
  source 1..20: mol_type = other DNA
tgttttctaaattagaaaat

SEQ ID NO: 71390 - DNA, 20 bp, synthetic construct
  misc_feature 1..20: note = Description of Artificial Sequence: Synthetic oligonucleotide
  misc_feature 1..20: note = Target: SCN10A; (+) strand; PAM type: YTN; PAM sequence: TTT
  source 1..20: mol_type = other DNA
tctaaattagaaaatcttaa

SEQ ID NO: 71391 - DNA, 20 bp, synthetic construct
  misc_feature 1..20: note = Description of Artificial Sequence: Synthetic oligonucleotide
  misc_feature 1..20: note = Target: SCN10A; (+) strand; PAM type: YTN; PAM sequence: TTT
  source 1..20: mol_type = other DNA
ctaaattagaaaatcttaac

SEQ ID NO: 71392 - DNA, 20 bp, synthetic construct
  misc_feature 1..20: note = Description of Artificial Sequence: Synthetic oligonucleotide
  misc_feature 1..20: note = Target: SCN10A; (+) strand; PAM type: YTN; PAM sequence: TTC
  source 1..20: mol_type = other DNA
taaattagaaaatcttaact

SEQ ID NO: 71393 - DNA, 20 bp, synthetic construct
  misc_feature 1..20: note = Description of Artificial Sequence: Synthetic oligonucleotide
  misc_feature 1..20: note = Target: SCN10A; (+) strand; PAM type: YTN; PAM sequence: CTA
  source 1..20: mol_type = other DNA
aattagaaaatcttaactca

SEQ ID NO: 71394 - DNA, 20 bp, synthetic construct
  misc_feature 1..20: note = Description of Artificial Sequence: Synthetic oligonucleotide
  misc_feature 1..20: note = Target: SCN10A; (+) strand; PAM type: YTN; PAM sequence: TTA
  source 1..20: mol_type = other DNA
gaaaatcttaactcagaatt

SEQ ID NO: 71395 - DNA, 20 bp, synthetic construct
  misc_feature 1..20: note = Description of Artificial Sequence: Synthetic oligonucleotide
  misc_feature 1..20: note = Target: SCN10A; (+) strand; PAM type: YTN; PAM sequence: CTT
  source 1..20: mol_type = other DNA
aactcagaattataggttgt

SEQ ID NO: 71396 - DNA, 20 bp, synthetic construct
  misc_feature 1..20: note = Description of Artificial Sequence: Synthetic oligonucleotide
  misc_feature 1..20: note = Target: SCN10A; (+) strand; PAM type: YTN; PAM sequence: TTA
  source 1..20: mol_type = other DNA
actcagaattataggttgtt

SEQ ID NO: 71397 - DNA, 20 bp, synthetic construct
  misc_feature 1..20: note = Description of Artificial Sequence: Synthetic oligonucleotide
  misc_feature 1..20: note = Target: SCN10A; (+) strand; PAM type: YTN; PAM sequence: CTC
  source 1..20: mol_type = other DNA
agaattataggttgttggga

SEQ ID NO: 71398 - DNA, 20 bp, synthetic construct
  misc_feature 1..20: note = Description of Artificial Sequence: Synthetic oligonucleotide
  misc_feature 1..20: note = Target: SCN10A; (+) strand; PAM type: YTN; PAM sequence: TTA
  source 1..20: mol_type = other DNA
taggttgttgggaagctttg

SEQ ID NO: 71399 - DNA, 20 bp, synthetic construct
  misc_feature 1..20: note = Description of Artificial Sequence: Synthetic oligonucleotide
  misc_feature 1..20: note = Target: SCN10A; (+) strand; PAM type: YTN; PAM sequence: TTG
  source 1..20: mol_type = other DNA
ttgggaagctttgatggata

SEQ ID NO: 71400 - DNA, 20 bp, synthetic construct
  misc_feature 1..20: note = Description of Artificial Sequence: Synthetic oligonucleotide
  misc_feature 1..20: note = Target: SCN10A; (+) strand; PAM type: YTN; PAM sequence: TTG
  source 1..20: mol_type = other DNA
ggaagctttgatggatattt

SEQ ID NO: 71401 - DNA, 20 bp, synthetic construct
  misc_feature 1..20: note = Description of Artificial Sequence: Synthetic oligonucleotide
  misc_feature 1..20: note = Target: SCN10A; (+) strand; PAM type: YTN; PAM sequence: CTT
  source 1..20: mol_type = other DNA
tgatggatatttctggtttg

SEQ ID NO: 71402 - DNA, 20 bp, synthetic construct
  misc_feature 1..20: note = Description of Artificial Sequence: Synthetic oligonucleotide
  misc_feature 1..20: note = Target: SCN10A; (+) strand; PAM type: YTN; PAM sequence: TTT
  source 1..20: mol_type = other DNA
gatggatatttctggtttgt

SEQ ID NO: 71403 - DNA, 20 bp, synthetic construct
  misc_feature 1..20: note = Description of Artificial Sequence: Synthetic oligonucleotide
  misc_feature 1..20: note = Target: SCN10A; (+) strand; PAM type: YTN; PAM sequence: TTG
  source 1..20: mol_type = other DNA
atggatatttctggtttgtc

SEQ ID NO: 71404 - DNA, 20 bp, synthetic construct
  misc_feature 1..20: note = Description of Artificial Sequence: Synthetic oligonucleotide
  misc_feature 1..20: note = Target: SCN10A; (+) strand; PAM type: YTN; PAM sequence: TTT
  source 1..20: mol_type = other DNA
ctggtttgtcaaatcaaaca

SEQ ID NO: 71405 - DNA, 20 bp, synthetic construct
  misc_feature 1..20: note = Description of Artificial Sequence: Synthetic oligonucleotide
  misc_feature 1..20: note = Target: SCN10A; (+) strand; PAM type: YTN; PAM sequence: TTC
  source 1..20: mol_type = other DNA
tggtttgtcaaatcaaacac

SEQ ID NO: 71406 - DNA, 20 bp, synthetic construct
  misc_feature 1..20: note = Description of Artificial Sequence: Synthetic oligonucleotide
  misc_feature 1..20: note = Target: SCN10A; (+) strand; PAM type: YTN; PAM sequence: CTG
  source 1..20: mol_type = other DNA
gtttgtcaaatcaaacacag

SEQ ID NO: 71407 - DNA, 20 bp, synthetic construct
  misc_feature 1..20: note = Description of Artificial Sequence: Synthetic oligonucleotide
  misc_feature 1..20: note = Target: SCN10A; (+) strand; PAM type: YTN; PAM sequence: TTT
  source 1..20: mol_type = other DNA
gtcaaatcaaacacagaccc

SEQ ID NO: 71408 - DNA, 20 bp, synthetic construct
  misc_feature 1..20: note = Description of Artificial Sequence: Synthetic oligonucleotide
  misc_feature 1..20: note = Target: SCN10A; (+) strand; PAM type: YTN; PAM sequence: TTG
  source 1..20: mol_type = other DNA
tcaaatcaaacacagaccca

SEQ ID NO: 71409 - DNA, 20 bp, synthetic construct
  misc_feature 1..20: note = Description of Artificial Sequence: Synthetic oligonucleotide
  misc_feature 1..20: note = Target: SCN10A; (+) strand; PAM type: YTN; PAM sequence: TTA
  source 1..20: mol_type = other DNA
tggagagagtgctctctaaa

SEQ ID NO: 71410 - DNA, 20 bp, synthetic construct
  misc_feature 1..20: note = Description of Artificial Sequence: Synthetic oligonucleotide
  misc_feature 1..20: note = Target: SCN10A; (+) strand; PAM type: YTN; PAM sequence: CTC
  source 1..20: mol_type = other DNA
tctaaagactattttcagtg

SEQ ID NO: 71411 - DNA, 20 bp, synthetic construct
  misc_feature 1..20: note = Description of Artificial Sequence: Synthetic oligonucleotide
  misc_feature 1..20: note = Target: SCN10A; (+) strand; PAM type: YTN; PAM sequence: CTC
  source 1..20: mol_type = other DNA
taaagactattttcagtgct

SEQ ID NO: 71412 - DNA, 20 bp, synthetic construct
  misc_feature 1..20: note = Description of Artificial Sequence: Synthetic oligonucleotide
  misc_feature 1..20: note = Target: SCN10A; (+) strand; PAM type: YTN; PAM sequence: CTA
  source 1..20: mol_type = other DNA
aagactattttcagtgcttc

SEQ ID NO: 71413 - DNA, 20 bp, synthetic construct
  misc_feature 1..20: note = Description of Artificial Sequence: Synthetic oligonucleotide
  misc_feature 1..20: note = Target: SCN10A; (+) strand; PAM type: YTN; PAM sequence: CTA
  source 1..20: mol_type = other DNA
ttttcagtgcttcaccagaa

SEQ ID NO: 71414 - DNA, 20 bp, synthetic construct
  misc_feature 1..20: note = Description of Artificial Sequence: Synthetic oligonucleotide
  misc_feature 1..20: note = Target: SCN10A; (+) strand; PAM type: YTN; PAM sequence: TTT
  source 1..20: mol_type = other DNA
tcagtgcttcaccagaaggc

SEQ ID NO: 71415 - DNA, 20 bp, synthetic construct
  misc_feature 1..20: note = Description of Artificial Sequence: Synthetic oligonucleotide
  misc_feature 1..20: note = Target: SCN10A; (+) strand; PAM type: YTN; PAM sequence: TTT
  source 1..20: mol_type = other DNA
cagtgcttcaccagaaggca

SEQ ID NO: 71416 - DNA, 20 bp, synthetic construct
  misc_feature 1..20: note = Description of Artificial Sequence: Synthetic oligonucleotide
  misc_feature 1..20: note = Target: SCN10A; (+) strand; PAM type: YTN; PAM sequence: TTC
  source 1..20: mol_type = other DNA
agtgcttcaccagaaggcaa

SEQ ID NO: 71417 - DNA, 20 bp, synthetic construct
  misc_feature 1..20: note = Description of Artificial Sequence: Synthetic oligonucleotide
  misc_feature 1..20: note = Target: SCN10A; (+) strand; PAM type: YTN; PAM sequence: CTT
  source 1..20: mol_type = other DNA
caccagaaggcaagtgcccc

SEQ ID NO: 71418 - DNA, 20 bp, synthetic construct
  misc_feature 1..20: note = Description of Artificial Sequence: Synthetic oligonucleotide
  misc_feature 1..20: note = Target: SCN10A; (+) strand; PAM type: YTN; PAM sequence: TTC
  source 1..20: mol_type = other DNA
accagaaggcaagtgcccca

SEQ ID NO: 71419 - DNA, 20 bp, synthetic construct
  misc_feature 1..20: note = Description of Artificial Sequence: Synthetic oligonucleotide
  misc_feature 1..20: note = Target: SCN10A; (+) strand; PAM type: YTN; PAM sequence: CTC
  source 1..20: mol_type = other DNA
aacagcagctaatggagttg

SEQ ID NO: 71420 - DNA, 20 bp, synthetic construct
  misc_feature 1..20: note = Description of Artificial Sequence: Synthetic oligonucleotide
  misc_feature 1..20: note = Target: SCN10A; (+) strand; PAM type: YTN; PAM sequence: CTA
  source 1..20: mol_type = other DNA
atggagttgcatcctctctt

SEQ ID NO: 71421 - DNA, 20 bp, synthetic construct
  misc_feature 1..20: note = Description of Artificial Sequence: Synthetic oligonucleotide
  misc_feature 1..20: note = Target: SCN10A; (+) strand; PAM type: YTN; PAM sequence: TTG
  source 1..20: mol_type = other DNA
catcctctctttggtggtat

SEQ ID NO: 71422 - DNA, 20 bp, synthetic construct
  misc_feature 1..20: note = Description of Artificial Sequence: Synthetic oligonucleotide
  misc_feature 1..20: note = Target: SCN10A; (+) strand; PAM type: YTN; PAM sequence: CTC
  source 1..20: mol_type = other DNA
tctttggtggtatttggctc

SEQ ID NO: 71423 - DNA, 20 bp, synthetic construct
  misc_feature 1..20: note = Description of Artificial Sequence: Synthetic oligonucleotide
  misc_feature 1..20: note = Target: SCN10A; (+) strand; PAM type: YTN; PAM sequence: CTC
  source 1..20: mol_type = other DNA
tttggtggtatttggctctg

SEQ ID NO: 71424 - DNA, 20 bp, synthetic construct
  misc_feature 1..20: note = Description of Artificial Sequence: Synthetic oligonucleotide
  misc_feature 1..20: note = Target: SCN10A; (+) strand; PAM type: YTN; PAM sequence: CTT
  source 1..20: mol_type = other DNA
tggtggtatttggctctgca

SEQ ID NO: 71425 - DNA, 20 bp, synthetic construct
  misc_feature 1..20: note = Description of Artificial Sequence: Synthetic oligonucleotide
  misc_feature 1..20: note = Target: SCN10A; (+) strand; PAM type: YTN; PAM sequence: TTT
  source 1..20: mol_type = other DNA
ggtggtatttggctctgcaa

SEQ ID NO: 71426 - DNA, 20 bp, synthetic construct
  misc_feature 1..20: note = Description of Artificial Sequence: Synthetic oligonucleotide
  misc_feature 1..20: note = Target: SCN10A; (+) strand; PAM type: YTN; PAM sequence: TTG
  source 1..20: mol_type = other DNA
gtggtatttggctctgcaag

SEQ ID NO: 71427 - DNA, 20 bp, synthetic construct
  misc_feature 1..20: note = Description of Artificial Sequence: Synthetic oligonucleotide
  misc_feature 1..20: note = Target: SCN10A; (+) strand; PAM type: YTN; PAM sequence: TTT
  source 1..20: mol_type = other DNA
ggctctgcaaggtatttctt

SEQ ID NO: 71428 - DNA, 20 bp, synthetic construct
  misc_feature 1..20: note = Description of Artificial Sequence: Synthetic oligonucleotide
  misc_feature 1..20: note = Target: SCN10A; (+) strand; PAM type: YTN; PAM sequence: TTG
  source 1..20: mol_type = other DNA
gctctgcaaggtatttcttg

SEQ ID NO: 71429 - DNA, 20 bp, synthetic construct
  misc_feature 1..20: note = Description of Artificial Sequence: Synthetic oligonucleotide
  misc_feature 1..20: note = Target: SCN10A; (+) strand; PAM type: YTN; PAM sequence: CTC
  source 1..20: mol_type = other DNA
tgcaaggtatttcttgatgt

SEQ ID NO: 71430 - DNA, 20 bp, synthetic construct
  misc_feature 1..20: note = Description of Artificial Sequence: Synthetic oligonucleotide
  misc_feature 1..20: note = Target: SCN10A; (+) strand; PAM type: YTN; PAM sequence: CTG
  source 1..20: mol_type = other DNA
caaggtatttcttgatgttg

SEQ ID NO: 71431 - DNA, 20 bp, synthetic construct
  misc_feature 1..20: note = Description of Artificial Sequence: Synthetic oligonucleotide
  misc_feature 1..20: note = Target: SCN10A; (+) strand; PAM type: YTN; PAM sequence: TTT
  source 1..20: mol_type = other DNA
cttgatgttgggttgcagca

SEQ ID NO: 71432 - DNA, 20 bp, synthetic construct
  misc_feature 1..20: note = Description of Artificial Sequence: Synthetic oligonucleotide
  misc_feature 1..20: note = Target: SCN10A; (+) strand; PAM type: YTN; PAM sequence: TTC
  source 1..20: mol_type = other DNA
ttgatgttgggttgcagcat

SEQ ID NO: 71433 - DNA, 20 bp, synthetic construct
  misc_feature 1..20: note = Description of Artificial Sequence: Synthetic oligonucleotide
  misc_feature 1..20: note = Target: SCN10A; (+) strand; PAM type: YTN; PAM sequence: CTT
  source 1..20: mol_type = other DNA
gatgttgggttgcagcattc

SEQ ID NO: 71434 - DNA, 20 bp, synthetic construct
  misc_feature 1..20: note = Description of Artificial Sequence: Synthetic oligonucleotide
  misc_feature 1..20: note = Target: SCN10A; (+) strand; PAM type: YTN; PAM sequence: TTG
  source 1..20: mol_type = other DNA
atgttgggttgcagcattca

SEQ ID NO: 71435 - DNA, 20 bp, synthetic construct
  misc_feature 1..20: note = Description of Artificial Sequence: Synthetic oligonucleotide
  misc_feature 1..20: note = Target: SCN10A; (+) strand; PAM type: YTN; PAM sequence: TTG
  source 1..20: mol_type = other DNA
ggttgcagcattcagatgta

SEQ ID NO: 71436 - DNA, 20 bp, synthetic construct
  misc_feature 1..20: note = Description of Artificial Sequence: Synthetic oligonucleotide
  misc_feature 1..20: note = Target: SCN10A; (+) strand; PAM type: YTN; PAM sequence: TTG
  source 1..20: mol_type = other DNA
cagcattcagatgtaatttt

SEQ ID NO: 71437 - DNA, 20 bp, synthetic construct
  misc_feature 1..20: note = Description of Artificial Sequence: Synthetic oligonucleotide
  misc_feature 1..20: note = Target: SCN10A; (+) strand; PAM type: YTN; PAM sequence: TTC
  source 1..20: mol_type = other DNA
agatgtaatttttaataagc

SEQ ID NO: 71438 - DNA, 20 bp, synthetic construct
  misc_feature 1..20: note = Description of Artificial Sequence: Synthetic oligonucleotide
  misc_feature 1..20: note = Target: SCN10A; (+) strand; PAM type: YTN; PAM sequence: TTT
  source 1..20: mol_type = other DNA
ttaataagcccaatgtgtta

SEQ ID NO: 71439 - DNA, 20 bp, synthetic construct
  misc_feature 1..20: note = Description of Artificial Sequence: Synthetic oligonucleotide
  misc_feature 1..20: note = Target: SCN10A; (+) strand; PAM type: YTN; PAM sequence: TTT
  source 1..20: mol_type = other DNA
taataagcccaatgtgttat

SEQ ID NO: 71440 - DNA, 20 bp, synthetic construct
  misc_feature 1..20: note = Description of Artificial Sequence: Synthetic oligonucleotide
  misc_feature 1..20: note = Target: SCN10A; (+) strand; PAM type: YTN; PAM sequence: TTT
  source 1..20: mol_type = other DNA
aataagcccaatgtgttatt

SEQ ID NO: 71441 - DNA, 20 bp, synthetic construct
  misc_feature 1..20: note = Description of Artificial Sequence: Synthetic oligonucleotide
  misc_feature 1..20: note = Target: SCN10A; (+) strand; PAM type: YTN; PAM sequence: TTA
  source 1..20: mol_type = other DNA
ataagcccaatgtgttattt

SEQ ID NO: 71442 - DNA, 20 bp, synthetic construct
  misc_feature 1..20: note = Description of Artificial Sequence: Synthetic oligonucleotide
  misc_feature 1..20: note = Target: SCN10A; (+) strand; PAM type: YTN; PAM sequence: TTA
  source 1..20: mol_type = other DNA
tttcctaagtgctttttctg

SEQ ID NO: 71443 - DNA, 20 bp, synthetic construct
  misc_feature 1..20: note = Description of Artificial Sequence: Synthetic oligonucleotide
  misc_feature 1..20: note = Target: SCN10A; (+) strand; PAM type: YTN; PAM sequence: TTT
  source 1..20: mol_type = other DNA
cctaagtgctttttctggtg

SEQ ID NO: 71444 - DNA, 20 bp, synthetic construct
  misc_feature 1..20: note = Description of Artificial Sequence: Synthetic oligonucleotide
  misc_feature 1..20: note = Target: SCN10A; (+) strand; PAM type: YTN; PAM sequence: TTC
  source 1..20: mol_type = other DNA
ctaagtgctttttctggtga

SEQ ID NO: 71445 - DNA, 20 bp, synthetic construct
  misc_feature 1..20: note = Description of Artificial Sequence: Synthetic oligonucleotide
  misc_feature 1..20: note = Target: SCN10A; (+) strand; PAM type: YTN; PAM sequence: CTA
  source 1..20: mol_type = other DNA
agtgctttttctggtgaatg

SEQ ID NO: 71446 - DNA, 20 bp, synthetic construct
  misc_feature 1..20: note = Description of Artificial Sequence: Synthetic oligonucleotide
  misc_feature 1..20: note = Target: SCN10A; (+) strand; PAM type: YTN; PAM sequence: CTT
  source 1..20: mol_type = other DNA
tttctggtgaatgaagaaaa

SEQ ID NO: 71447 - DNA, 20 bp, synthetic construct
  misc_feature 1..20: note = Description of Artificial Sequence: Synthetic oligonucleotide
  misc_feature 1..20: note = Target: SCN10A; (+) strand; PAM type: YTN; PAM sequence: TTT
  source 1..20: mol_type = other DNA
ttctggtgaatgaagaaaat

SEQ ID NO: 71448 - DNA, 20 bp, synthetic construct
  misc_feature 1..20: note = Description of Artificial Sequence: Synthetic oligonucleotide
  misc_feature 1..20: note = Target: SCN10A; (+) strand; PAM type: YTN; PAM sequence: TTT
  source 1..20: mol_type = other DNA
tctggtgaatgaagaaaatc

SEQ ID NO: 71449 - DNA, 20 bp, synthetic construct
  misc_feature 1..20: note = Description of Artificial Sequence: Synthetic oligonucleotide
  misc_feature 1..20: note = Target: SCN10A; (+) strand; PAM type: YTN; PAM sequence: TTT
  source 1..20: mol_type = other DNA
ctggtgaatgaagaaaatca

SEQ ID NO: 71450 - DNA, 20 bp, synthetic construct
  misc_feature 1..20: note = Description of Artificial Sequence: Synthetic oligonucleotide
  misc_feature 1..20: note = Target: SCN10A; (+) strand; PAM type: YTN; PAM sequence: TTC
  source 1..20: mol_type = other DNA
tggtgaatgaagaaaatcat

SEQ ID NO: 71451 - DNA, 20 bp, synthetic construct
  misc_feature 1..20: note = Description of Artificial Sequence: Synthetic oligonucleotide
  misc_feature 1..20: note = Target: SCN10A; (+) strand; PAM type: YTN; PAM sequence: CTG
  source 1..20: mol_type = other DNA
gtgaatgaagaaaatcattg

SEQ ID NO: 71452 - DNA, 20 bp, synthetic construct
  misc_feature 1..20: note = Description of Artificial Sequence: Synthetic oligonucleotide
  misc_feature 1..20: note = Target: SCN10A; (+) strand; PAM type: YTN; PAM sequence: TTG
  source 1..20: mol_type = other DNA
ggtattgggaaaaagtcaag

SEQ ID NO: 71453 - DNA, 20 bp, synthetic construct
  misc_feature 1..20: note = Description of Artificial Sequence: Synthetic oligonucleotide
  misc_feature 1..20: note = Target: SCN10A; (+) strand; PAM type: YTN; PAM sequence: TTG
  source 1..20: mol_type = other DNA
ggaaaaagtcaagttctcag

SEQ ID NO: 71454 - DNA, 20 bp, synthetic construct
  misc_feature 1..20: note = Description of Artificial Sequence: Synthetic oligonucleotide
  misc_feature 1..20: note = Target: SCN10A; (+) strand; PAM type: YTN; PAM sequence: TTC
  source 1..20: mol_type = other DNA
tcagccgttgagccacttgc

SEQ ID NO: 71455 - DNA, 20 bp, synthetic construct
  misc_feature 1..20: note = Description of Artificial Sequence: Synthetic oligonucleotide
  misc_feature 1..20: note = Target: SCN10A; (+) strand; PAM type: YTN; PAM sequence: CTC
  source 1..20: mol_type = other DNA
agccgttgagccacttgcac

SEQ ID NO: 71456 - DNA, 20 bp, synthetic construct
  misc_feature 1..20: note = Description of Artificial Sequence: Synthetic oligonucleotide
  misc_feature 1..20: note = Target: SCN10A; (+) strand; PAM type: YTN; PAM sequence: TTG
  source 1..20: mol_type = other DNA
agccacttgcaccactgatg

SEQ ID NO: 71457 - DNA, 20 bp, synthetic construct
  misc_feature 1..20: note = Description of Artificial Sequence: Synthetic oligonucleotide
  misc_feature 1..20: note = Target: SCN10A; (+) strand; PAM type: YTN; PAM sequence: CTT
  source 1..20: mol_type = other DNA
gcaccactgatgtctgattg

SEQ ID NO: 71458 - DNA, 20 bp, synthetic construct
  misc_feature 1..20: note = Description of Artificial Sequence: Synthetic oligonucleotide
  misc_feature 1..20: note = Target: SCN10A; (+) strand; PAM type: YTN; PAM sequence: TTG
  source 1..20: mol_type = other DNA
caccactgatgtctgattgt

SEQ ID NO: 71459 - DNA, 20 bp, synthetic construct
  misc_feature 1..20: note = Description of Artificial Sequence: Synthetic oligonucleotide
  misc_feature 1..20: note = Target: SCN10A; (+) strand; PAM type: YTN; PAM sequence: CTG
  source 1..20: mol_type = other DNA
atgtctgattgttacaaatc

SEQ ID NO: 71460 - DNA, 20 bp, synthetic construct
  misc_feature 1..20: note = Description of Artificial Sequence: Synthetic oligonucleotide
  misc_feature 1..20: note = Target: SCN10A; (+) strand; PAM type: YTN; PAM sequence: CTG
  source 1..20: mol_type = other DNA
attgttacaaatcccgatat

SEQ ID NO: 71461 - DNA, 20 bp, synthetic construct
  misc_feature 1..20: note = Description of Artificial Sequence: Synthetic oligonucleotide
  misc_feature 1..20: note = Target: SCN10A; (+) strand; PAM type: YTN; PAM sequence: TTG
  source 1..20: mol_type = other DNA
ttacaaatcccgatattcag

SEQ ID NO: 71462 - DNA, 20 bp, synthetic construct
  misc_feature 1..20: note = Description of Artificial Sequence: Synthetic oligonucleotide
  misc_feature 1..20: note = Target: SCN10A; (+) strand; PAM type: YTN; PAM sequence: TTA
  source 1..20: mol_type = other DNA
caaatcccgatattcaggct

SEQ ID NO: 71463 - DNA, 20 bp, synthetic construct
  misc_feature 1..20: note = Description of Artificial Sequence: Synthetic oligonucleotide
  misc_feature 1..20: note = Target: SCN10A; (+) strand; PAM type: YTN; PAM sequence: TTC
  source 1..20: mol_type = other DNA
aggctctgaaaacaaagatt

SEQ ID NO: 71464 - DNA, 20 bp, synthetic construct
  misc_feature 1..20: note = Description of Artificial Sequence: Synthetic oligonucleotide
  misc_feature 1..20: note = Target: SCN10A; (+) strand; PAM type: YTN; PAM sequence: CTC
  source 1..20: mol_type = other DNA
tgaaaacaaagattcataat

SEQ ID NO: 71465 - DNA, 20 bp, synthetic construct
  misc_feature 1..20: note = Description of Artificial Sequence: Synthetic oligonucleotide
  misc_feature 1..20: note = Target: SCN10A; (+) strand; PAM type: YTN; PAM sequence: CTG
  source 1..20: mol_type = other DNA
aaaacaaagattcataatat

SEQ ID NO: 71466 - DNA, 20 bp, synthetic construct
  misc_feature 1..20: note = Description of Artificial Sequence: Synthetic oligonucleotide
  misc_feature 1..20: note = Target: SCN10A; (+) strand; PAM type: YTN; PAM sequence: TTC
  source 1..20: mol_type = other DNA
ataatattcaaattctgaat

SEQ ID NO: 71467 - DNA, 20 bp, synthetic construct
  misc_feature 1..20: note = Description of Artificial Sequence: Synthetic oligonucleotide
  misc_feature 1..20: note = Target: SCN10A; (+) strand; PAM type: YTN; PAM sequence: TTC
  source 1..20: mol_type = other DNA
aaattctgaatggatcactg

SEQ ID NO: 71468 - DNA, 20 bp, synthetic construct
  misc_feature 1..20: note = Description of Artificial Sequence: Synthetic oligonucleotide
  misc_feature 1..20: note = Target: SCN10A; (+) strand; PAM type: YTN; PAM sequence: TTC
  source 1..20: mol_type = other DNA
tgaatggatcactgagatac

SEQ ID NO: 71469 - DNA, 20 bp, synthetic construct
  misc_feature 1..20: note = Description of Artificial Sequence: Synthetic oligonucleotide
  misc_feature 1..20: note = Target: SCN10A; (+) strand; PAM type: YTN; PAM sequence: CTG
  source 1..20: mol_type = other DNA
aatggatcactgagataccc

SEQ ID NO: 71470 - DNA, 20 bp, synthetic construct
  misc_feature 1..20: note = Description of Artificial Sequence: Synthetic oligonucleotide
  misc_feature 1..20: note = Target: SCN10A; (+) strand; PAM type: YTN; PAM sequence: CTG
  source 1..20: mol_type = other DNA
agatacccaacttgtattca

SEQ ID NO: 71471 - DNA, 20 bp, synthetic construct
  misc_feature 1..20: note = Description of Artificial Sequence: Synthetic oligonucleotide
  misc_feature 1..20: note = Target: SCN10A; (+) strand; PAM type: YTN; PAM sequence: CTT
  source 1..20: mol_type = other DNA
gtattcataaaaatggtaat

SEQ ID NO: 71472 - DNA, 20 bp, synthetic construct
  misc_feature 1..20: note = Description of Artificial Sequence: Synthetic oligonucleotide
  misc_feature 1..20: note = Target: SCN10A; (+) strand; PAM type: YTN; PAM sequence: TTG
  source 1..20: mol_type = other DNA
tattcataaaaatggtaatt

SEQ ID NO: 71473 - DNA, 20 bp, synthetic construct
  misc_feature 1..20: note = Description of Artificial Sequence: Synthetic oligonucleotide
  misc_feature 1..20: note = Target: SCN10A; (+) strand; PAM type: YTN; PAM sequence: TTC
  source 1..20: mol_type = other DNA
ataaaaatggtaatttaaaa

SEQ ID NO: 71474 - DNA, 20 bp, synthetic construct
  misc_feature 1..20: note = Description of Artificial Sequence: Synthetic oligonucleotide
  misc_feature 1..20: note = Target: SCN10A; (+) strand; PAM type: YTN; PAM sequence: TTT
  source 1..20: mol_type = other DNA
aaaacatttcattccttatt

SEQ ID NO: 71475 - DNA, 20 bp, synthetic construct
  misc_feature 1..20: note = Description of Artificial Sequence: Synthetic oligonucleotide
  misc_feature 1..20: note = Target: SCN10A; (+) strand; PAM type: YTN; PAM sequence: TTA
  source 1..20: mol_type = other DNA
aaacatttcattccttattt

SEQ ID NO: 71476 - DNA, 20 bp, synthetic construct
  misc_feature 1..20: note = Description of Artificial Sequence: Synthetic oligonucleotide
  misc_feature 1..20: note = Target: SCN10A; (+) strand; PAM type: YTN; PAM sequence: TTT
  source 1..20: mol_type = other DNA
cattccttatttttaaaact

SEQ ID NO: 71477 - DNA, 20 bp, synthetic construct
  misc_feature 1..20: note = Description of Artificial Sequence: Synthetic oligonucleotide
  misc_feature 1..20: note = Target: SCN10A; (+) strand; PAM type: YTN; PAM sequence: TTC
  source 1..20: mol_type = other DNA
attccttatttttaaaactc

SEQ ID NO: 71478 - DNA, 20 bp, synthetic construct
  misc_feature 1..20: note = Description of Artificial Sequence: Synthetic oligonucleotide
  misc_feature 1..20: note = Target: SCN10A; (+) strand; PAM type: YTN; PAM sequence: TTC
  source 1..20: mol_type = other DNA
cttatttttaaaactctgtg

SEQ ID NO: 71479 - DNA, 20 bp, synthetic construct
  misc_feature 1..20: note = Description of Artificial Sequence: Synthetic oligonucleotide
  misc_feature 1..20: note = Target: SCN10A; (+) strand; PAM type: YTN; PAM sequence: CTT
  source 1..20: mol_type = other DNA
atttttaaaactctgtgtaa

SEQ ID NO: 71480 - DNA, 20 bp, synthetic construct
  misc_feature 1..20: note = Description of Artificial Sequence: Synthetic oligonucleotide
  misc_feature 1..20: note = Target: SCN10A; (+) strand; PAM type: YTN; PAM sequence: TTA
  source 1..20: mol_type = other DNA
tttttaaaactctgtgtaag

SEQ ID NO: 71481 - DNA, 20 bp, synthetic construct
  misc_feature 1..20: note = Description of Artificial Sequence: Synthetic oligonucleotide
  misc_feature 1..20: note = Target: SCN10A; (+) strand; PAM type: YTN; PAM sequence: TTT
  source 1..20: mol_type = other DNA
ttaaaactctgtgtaagccc

SEQ ID NO: 71482 - DNA, 20 bp, synthetic construct
  misc_feature 1..20: note = Description of Artificial Sequence: Synthetic oligonucleotide
  misc_feature 1..20: note = Target: SCN10A; (+) strand; PAM type: YTN; PAM sequence: TTT
  source 1..20: mol_type = other DNA
taaaactctgtgtaagccct

SEQ ID NO: 71483 - DNA, 20 bp, synthetic construct
  misc_feature 1..20: note = Description of Artificial Sequence: Synthetic oligonucleotide
  misc_feature 1..20: note = Target: SCN10A; (+) strand; PAM type: YTN; PAM sequence: TTT
  source 1..20: mol_type = other DNA
aaaactctgtgtaagccctt

SEQ ID NO: 71484 - DNA, 20 bp, synthetic construct
  misc_feature 1..20: note = Description of Artificial Sequence: Synthetic oligonucleotide
  misc_feature 1..20: note = Target: SCN10A; (+) strand; PAM type: YTN; PAM sequence: TTA
  source 1..20: mol_type = other DNA
aaactctgtgtaagcccttc

SEQ ID NO: 71485 - DNA, 20 bp, synthetic construct
  misc_feature 1..20: note = Description of Artificial Sequence: Synthetic oligonucleotide
  misc_feature 1..20: note = Target: SCN10A; (+) strand; PAM type: YTN; PAM sequence: CTC
  source 1..20: mol_type = other DNA
tgtgtaagcccttcccattt

SEQ ID NO: 71486 - DNA, 20 bp, synthetic construct
  misc_feature 1..20: note = Description of Artificial Sequence: Synthetic oligonucleotide
  misc_feature 1..20: note = Target: SCN10A; (+) strand; PAM type: YTN; PAM sequence: CTG
  source 1..20: mol_type = other DNA
tgtaagcccttcccatttgc

SEQ ID NO: 71487 - DNA, 20 bp, synthetic construct
  misc_feature 1..20: note = Description of Artificial Sequence: Synthetic oligonucleotide
  misc_feature 1..20: note = Target: SCN10A; (+) strand; PAM type: YTN; PAM sequence: CTT
  source 1..20: mol_type = other DNA
cccatttgccagccaaagca

SEQ ID NO: 71488 - DNA, 20 bp, synthetic construct
  misc_feature 1..20: note = Description of Artificial Sequence: Synthetic oligonucleotide
  misc_feature 1..20: note = Target: SCN10A; (+) strand; PAM type: YTN; PAM sequence: TTC
  source 1..20: mol_type = other DNA
ccatttgccagccaaagcaa

SEQ ID NO: 71489 - DNA, 20 bp, synthetic construct
  misc_feature 1..20: note = Description of Artificial Sequence: Synthetic oligonucleotide
  misc_feature 1..20: note = Target: SCN10A; (+) strand; PAM type: YTN; PAM sequence: TTT
  source 1..20: mol_type = other DNA
gccagccaaagcaattcagt

SEQ ID NO: 71490 - DNA, 20 bp, synthetic construct
  misc_feature 1..20: note = Description of Artificial Sequence: Synthetic oligonucleotide
  misc_feature 1..20: note = Target: SCN10A; (+) strand; PAM type: YTN; PAM sequence: TTG
  source 1..20: mol_type = other DNA
ccagccaaagcaattcagtg

SEQ ID NO: 71491 - DNA, 20 bp, synthetic construct
  misc_feature 1..20: note = Description of Artificial Sequence: Synthetic oligonucleotide
  misc_feature 1..20: note = Target: SCN10A; (+) strand; PAM type: YTN; PAM sequence: TTC
  source 1..20: mol_type = other DNA
agtgtgggagagcagcctct

SEQ ID NO: 71492 - DNA, 20 bp, synthetic construct
  misc_feature 1..20: note = Description of Artificial Sequence: Synthetic oligonucleotide
  misc_feature 1..20: note = Target: SCN10A; (+) strand; PAM type: YTN; PAM sequence: CTC
  source 1..20: mol_type = other DNA
tcttactcacttttcatttc

SEQ ID NO: 71493 - DNA, 20 bp, synthetic construct
  misc_feature 1..20: note = Description of Artificial Sequence: Synthetic oligonucleotide
  misc_feature 1..20: note = Target: SCN10A; (+) strand; PAM type: YTN; PAM sequence: CTC
  source 1..20: mol_type = other DNA
ttactcacttttcatttcag

SEQ ID NO: 71494 - DNA, 20 bp, synthetic construct
  misc_feature 1..20: note = Description of Artificial Sequence: Synthetic oligonucleotide
  misc_feature 1..20: note = Target: SCN10A; (+) strand; PAM type: YTN; PAM sequence: CTT
  source 1..20: mol_type = other DNA
actcacttttcatttcagcc

SEQ ID NO: 71495 - DNA, 20 bp, synthetic construct
  misc_feature 1..20: note = Description of Artificial Sequence: Synthetic oligonucleotide
  misc_feature 1..20: note = Target: SCN10A; (+) strand; PAM type: YTN; PAM sequence: TTA
  source 1..20: mol_type = other DNA
ctcacttttcatttcagccc

SEQ ID NO: 71496 - DNA, 20 bp, synthetic construct
  misc_feature 1..20: note = Description of Artificial Sequence: Synthetic oligonucleotide
  misc_feature 1..20: note = Target: SCN10A; (+) strand; PAM type: YTN; PAM sequence: CTC
  source 1..20: mol_type = other DNA
acttttcatttcagcccagt

SEQ ID NO: 71497 - DNA, 20 bp, synthetic construct
  misc_feature 1..20: note = Description of Artificial Sequence: Synthetic oligonucleotide
  misc_feature 1..20: note = Target: SCN10A; (+) strand; PAM type: YTN; PAM sequence: CTT
  source 1..20: mol_type = other DNA
ttcatttcagcccagtaggc

SEQ ID NO: 71498 - DNA, 20 bp, synthetic construct
  misc_feature 1..20: note = Description of Artificial Sequence: Synthetic oligonucleotide
  misc_feature 1..20: note = Target: SCN10A; (+) strand; PAM type: YTN; PAM sequence: TTT
  source 1..20: mol_type = other DNA
tcatttcagcccagtaggcc

SEQ ID NO: 71499 - DNA, 20 bp, synthetic construct
  misc_feature 1..20: note = Description of Artificial Sequence: Synthetic oligonucleotide
  misc_feature 1..20: note = Target: SCN10A; (+) strand; PAM type: YTN; PAM sequence: TTT
  source 1..20: mol_type = other DNA
catttcagcccagtaggcca

SEQ ID NO: 71500 - DNA, 20 bp, synthetic construct
  misc_feature 1..20: note = Description of Artificial Sequence: Synthetic oligonucleotide
  misc_feature 1..20: note = Target: SCN10A; (+) strand; PAM type: YTN; PAM sequence: TTC
  source 1..20: mol_type = other DNA
atttcagcccagtaggccaa

SEQ ID NO: 71501 - DNA, 20 bp, synthetic construct
  misc_feature 1..20: note = Description of Artificial Sequence: Synthetic oligonucleotide
  misc_feature 1..20: note = Target: SCN10A; (+) strand; PAM type: YTN; PAM sequence: TTT
  source 1..20: mol_type = other DNA
cagcccagtaggccaaagag

SEQ ID NO: 71502 - DNA, 20 bp, synthetic construct
  misc_feature 1..20: note = Description of Artificial Sequence: Synthetic oligonucleotide
  misc_feature 1..20: note = Target: SCN10A; (+) strand; PAM type: YTN; PAM sequence: TTC
  source 1..20: mol_type = other DNA
agcccagtaggccaaagaga

SEQ ID NO: 71503 - DNA, 20 bp, synthetic construct
  misc_feature 1..20: note = Description of Artificial Sequence: Synthetic oligonucleotide
  misc_feature 1..20: note = Target: SCN10A; (+) strand; PAM type: YTN; PAM sequence: CTA
  source 1..20: mol_type = other DNA
agtgaccacaatcagtttgt

SEQ ID NO: 71504 - DNA, 20 bp, synthetic construct
  misc_feature 1..20: note = Description of Artificial Sequence: Synthetic oligonucleotide
  misc_feature 1..20: note = Target: SCN10A; (+) strand; PAM type: YTN; PAM sequence: TTT
  source 1..20: mol_type = other DNA
gtattcacaatttccactgt

SEQ ID NO: 71505 - DNA, 20 bp, synthetic construct
  misc_feature 1..20: note = Description of Artificial Sequence: Synthetic oligonucleotide
  misc_feature 1..20: note = Target: SCN10A; (+) strand; PAM type: YTN; PAM sequence: TTG
  source 1..20: mol_type = other DNA
tattcacaatttccactgtg

SEQ ID NO: 71506 - DNA, 20 bp, synthetic construct
  misc_feature 1..20: note = Description of Artificial Sequence: Synthetic oligonucleotide
  misc_feature 1..20: note = Target: SCN10A; (+) strand; PAM type: YTN; PAM sequence: TTC
  source 1..20: mol_type = other DNA
acaatttccactgtgtacct

SEQ ID NO: 71507 - DNA, 20 bp, synthetic construct
  misc_feature 1..20: note = Description of Artificial Sequence: Synthetic oligonucleotide
  misc_feature 1..20: note = Target: SCN10A; (+) strand; PAM type: YTN; PAM sequence: TTT
  source 1..20: mol_type = other DNA
ccactgtgtacctcaacagc

SEQ ID NO: 71508 - DNA, 20 bp, synthetic construct
  misc_feature 1..20: note = Description of Artificial Sequence: Synthetic oligonucleotide
  misc_feature 1..20: note = Target: SCN10A; (+) strand; PAM type: YTN; PAM sequence: TTC
  source 1..20: mol_type = other DNA
cactgtgtacctcaacagca

SEQ ID NO: 71509 - DNA, 20 bp, synthetic construct
  misc_feature 1..20: note = Description of Artificial Sequence: Synthetic oligonucleotide
  misc_feature 1..20: note = Target: SCN10A; (+) strand; PAM type: YTN; PAM sequence: CTG
  source 1..20: mol_type = other DNA
tgtacctcaacagcaaatca

SEQ ID NO: 71510 - DNA, 20 bp, synthetic construct
  misc_feature 1..20: note = Description of Artificial Sequence: Synthetic oligonucleotide
  misc_feature 1..20: note = Target: SCN10A; (+) strand; PAM type: YTN; PAM sequence: CTC
  source 1..20: mol_type = other DNA
aacagcaaatcagaatctgg

SEQ ID NO: 71511 - DNA, 20 bp, synthetic construct
  misc_feature 1..20: note = Description of Artificial Sequence: Synthetic oligonucleotide
  misc_feature 1..20: note = Target: SCN10A; (+) strand; PAM type: YTN; PAM sequence: CTG
  source 1..20: mol_type = other DNA
gaggcatattacagaccccc

SEQ ID NO: 71512 - DNA, 20 bp, synthetic construct
  misc_feature 1..20: note = Description of Artificial Sequence: Synthetic oligonucleotide
  misc_feature 1..20: note = Target: SCN10A; (+) strand; PAM type: YTN; PAM sequence: TTA
  source 1..20: mol_type = other DNA
cagacccccagctgcgttcc

SEQ ID NO: 71513 - DNA, 20 bp, synthetic construct
  misc_feature 1..20: note = Description of Artificial Sequence: Synthetic oligonucleotide
  misc_feature 1..20: note = Target: SCN10A; (+) strand; PAM type: YTN; PAM sequence: CTG
  source 1..20: mol_type = other DNA
cgttccgtgaataaggtatg

SEQ ID NO: 71514 - DNA, 20 bp, synthetic construct
  misc_feature 1..20: note = Description of Artificial Sequence: Synthetic oligonucleotide
  misc_feature 1..20: note = Target: SCN10A; (+) strand; PAM type: YTN; PAM sequence: TTC
  source 1..20: mol_type = other DNA
cgtgaataaggtatgcacta

SEQ ID NO: 71515 - DNA, 20 bp, synthetic construct
  misc_feature 1..20: note = Description of Artificial Sequence: Synthetic oligonucleotide
  misc_feature 1..20: note = Target: SCN10A; (+) strand; PAM type: YTN; PAM sequence: CTA
  source 1..20: mol_type = other DNA
gcattgggatctgggagcag

SEQ ID NO: 71516 - DNA, 20 bp, synthetic construct
  misc_feature 1..20: note = Description of Artificial Sequence: Synthetic oligonucleotide
  misc_feature 1..20: note = Target: SCN10A; (+) strand; PAM type: YTN; PAM sequence: TTG
  source 1..20: mol_type = other DNA
ggatctgggagcagcatctt

SEQ ID NO: 71517 - DNA, 20 bp, synthetic construct
  misc_feature 1..20: note = Description of Artificial Sequence: Synthetic oligonucleotide
  misc_feature 1..20: note = Target: SCN10A; (+) strand; PAM type: YTN; PAM sequence: CTG
  source 1..20: mol_type = other DNA
ggagcagcatcttctatctg

SEQ ID NO: 71518 - DNA, 20 bp, synthetic construct
  misc_feature 1..20: note = Description of Artificial Sequence: Synthetic oligonucleotide
  misc_feature 1..20: note = Target: SCN10A; (+) strand; PAM type: YTN; PAM sequence: CTT
  source 1..20: mol_type = other DNA
ctatctggatagtgatacct

SEQ ID NO: 71519 - DNA, 20 bp, synthetic construct
  misc_feature 1..20: note = Description of Artificial Sequence: Synthetic oligonucleotide
  misc_feature 1..20: note = Target: SCN10A; (+) strand; PAM type: YTN; PAM sequence: TTC
  source 1..20: mol_type = other DNA
tatctggatagtgatacctt

SEQ ID NO: 71520 - DNA, 20 bp, synthetic construct
  misc_feature 1..20: note = Description of Artificial Sequence: Synthetic oligonucleotide
  misc_feature 1..20: note = Target: SCN10A; (+) strand; PAM type: YTN; PAM sequence: CTA
  source 1..20: mol_type = other DNA
tctggatagtgatacctttc

SEQ ID NO: 71521 - DNA, 20 bp, synthetic construct
  misc_feature 1..20: note = Description of Artificial Sequence: Synthetic oligonucleotide
  misc_feature 1..20: note = Target: SCN10A; (+) strand; PAM type: YTN; PAM sequence: CTG
  source 1..20: mol_type = other DNA
gatagtgatacctttccttg

SEQ ID NO: 71522 - DNA, 20 bp, synthetic construct
  misc_feature 1..20: note = Description of Artificial Sequence: Synthetic oligonucleotide
  misc_feature 1..20: note = Target: SCN10A; (+) strand; PAM type: YTN; PAM sequence: CTT
  source 1..20: mol_type = other DNA
tccttgctgaccatgtggct

SEQ ID NO: 71523 - DNA, 20 bp, synthetic construct
  misc_feature 1..20: note = Description of Artificial Sequence: Synthetic oligonucleotide
  misc_feature 1..20: note = Target: SCN10A; (+) strand; PAM type: YTN; PAM sequence: TTT
  source 1..20: mol_type = other DNA
ccttgctgaccatgtggctg

SEQ ID NO: 71524 - DNA, 20 bp, synthetic construct
  misc_feature 1..20: note = Description of Artificial Sequence: Synthetic oligonucleotide
  misc_feature 1..20: note = Target: SCN10A; (+) strand; PAM type: YTN; PAM sequence: TTC
  source 1..20: mol_type = other DNA
cttgctgaccatgtggctgg

SEQ ID NO: 71525 - DNA, 20 bp, synthetic construct
  misc_feature 1..20: note = Description of Artificial Sequence: Synthetic oligonucleotide
  misc_feature 1..20: note = Target: SCN10A; (+) strand; PAM type: YTN; PAM sequence: CTT
  source 1..20: mol_type = other DNA
gctgaccatgtggctggagt

SEQ ID NO: 71526 - DNA, 20 bp, synthetic construct
  misc_feature 1..20: note = Description of Artificial Sequence: Synthetic oligonucleotide
  misc_feature 1..20: note = Target: SCN10A; (+) strand; PAM type: YTN; PAM sequence: TTG
  source 1..20: mol_type = other DNA
ctgaccatgtggctggagtt

SEQ ID NO: 71527 - DNA, 20 bp, synthetic construct
  misc_feature 1..20: note = Description of Artificial Sequence: Synthetic oligonucleotide
  misc_feature 1..20: note = Target: SCN10A; (+) strand; PAM type: YTN; PAM sequence: CTG
  source 1..20: mol_type = other DNA
accatgtggctggagtttct

SEQ ID NO: 71528 - DNA, 20 bp, synthetic construct
  misc_feature 1..20: note = Description of Artificial Sequence: Synthetic oligonucleotide
  misc_feature 1..20: note = Target: SCN10A; (+) strand; PAM type: YTN; PAM sequence: CTG
  source 1..20: mol_type = other DNA
gagtttcttcaatggcaatt

SEQ ID NO: 71529 - DNA, 20 bp, synthetic construct
  misc_feature 1..20: note = Description of Artificial Sequence: Synthetic oligonucleotide
  misc_feature 1..20: note = Target: SCN10A; (+) strand; PAM type: YTN; PAM sequence: TTT
  source 1..20: mol_type = other DNA
cttcaatggcaatttaacac

SEQ ID NO: 71530 - DNA, 20 bp, synthetic construct
  misc_feature 1..20: note = Description of Artificial Sequence: Synthetic oligonucleotide
  misc_feature 1..20: note = Target: SCN10A; (+) strand; PAM type: YTN; PAM sequence: TTC
  source 1..20: mol_type = other DNA
ttcaatggcaatttaacacc

SEQ ID NO: 71531 - DNA, 20 bp, synthetic construct
  misc_feature 1..20: note = Description of Artificial Sequence: Synthetic oligonucleotide
  misc_feature 1..20: note = Target: SCN10A; (+) strand; PAM type: YTN; PAM sequence: CTT
  source 1..20: mol_type = other DNA
caatggcaatttaacacctt

SEQ ID NO: 71532 - DNA, 20 bp, synthetic construct
  misc_feature 1..20: note = Description of Artificial Sequence: Synthetic oligonucleotide
  misc_feature 1..20: note = Target: SCN10A; (+) strand; PAM type: YTN; PAM sequence: TTC
  source 1..20: mol_type = other DNA
aatggcaatttaacaccttt

SEQ ID NO: 71533 - DNA, 20 bp, synthetic construct
  misc_feature 1..20: note = Description of Artificial Sequence: Synthetic oligonucleotide
  misc_feature 1..20: note = Target: SCN10A; (+) strand; PAM type: YTN; PAM sequence: TTT
  source 1..20: mol_type = other DNA
aacacctttcctcttttaaa

SEQ ID NO: 71534 - DNA, 20 bp, synthetic construct
  misc_feature 1..20: note = Description of Artificial Sequence: Synthetic oligonucleotide
  misc_feature 1..20: note = Target: SCN10A; (+) strand; PAM type: YTN; PAM sequence: TTA
  source 1..20: mol_type = other DNA
acacctttcctcttttaaaa

SEQ ID NO: 71535 - DNA, 20 bp, synthetic construct
  misc_feature 1..20: note = Description of Artificial Sequence: Synthetic oligonucleotide
  misc_feature 1..20: note = Target: SCN10A; (+) strand; PAM type: YTN; PAM sequence: CTT
  source 1..20: mol_type = other DNA
tcctcttttaaaaaaaagtt

SEQ ID NO: 71536 - DNA, 20 bp, synthetic construct
  misc_feature 1..20: note = Description of Artificial Sequence: Synthetic oligonucleotide
  misc_feature 1..20: note = Target: SCN10A; (+) strand; PAM type: YTN; PAM sequence: TTT
  source 1..20: mol_type = other DNA
cctcttttaaaaaaaagttt

SEQ ID NO: 71537 - DNA, 20 bp, synthetic construct
  misc_feature 1..20: note = Description of Artificial Sequence: Synthetic oligonucleotide
  misc_feature 1..20: note = Target: SCN10A; (+) strand; PAM type: YTN; PAM sequence: TTC
  source 1..20: mol_type = other DNA
ctcttttaaaaaaaagtttt

SEQ ID NO: 71538 - DNA, 20 bp, synthetic construct
  misc_feature 1..20: note = Description of Artificial Sequence: Synthetic oligonucleotide
  misc_feature 1..20: note = Target: SCN10A; (+) strand; PAM type: YTN; PAM sequence: CTC
  source 1..20: mol_type = other DNA
ttttaaaaaaaagttttggt

SEQ ID NO: 71539 - DNA, 20 bp, synthetic construct
  misc_feature 1..20: note = Description of Artificial Sequence: Synthetic oligonucleotide
  misc_feature 1..20: note = Target: SCN10A; (+) strand; PAM type: YTN; PAM sequence: CTT
  source 1..20: mol_type = other DNA
ttaaaaaaaagttttggtaa

SEQ ID NO: 71540 - DNA, 20 bp, synthetic construct
  misc_feature 1..20: note = Description of Artificial Sequence: Synthetic oligonucleotide
  misc_feature 1..20: note = Target: SCN10A; (+) strand; PAM type: YTN; PAM sequence: TTT
  source 1..20: mol_type = other DNA
taaaaaaaagttttggtaaa

SEQ ID NO: 71541 - DNA, 20 bp, synthetic construct
  misc_feature 1..20: note = Description of Artificial Sequence: Synthetic oligonucleotide
  misc_feature 1..20: note = Target: SCN10A; (+) strand; PAM type: YTN; PAM sequence: TTT
  source 1..20: mol_type = other DNA
aaaaaaaagttttggtaaaa

SEQ ID NO: 71542 - DNA, 20 bp, synthetic construct
  misc_feature 1..20: note = Description of Artificial Sequence: Synthetic oligonucleotide
  misc_feature 1..20: note = Target: SCN10A; (+) strand; PAM type: YTN; PAM sequence: TTA
  source 1..20: mol_type = other DNA
aaaaaaagttttggtaaaat

SEQ ID NO: 71543 - DNA, 20 bp, synthetic construct
  misc_feature 1..20: note = Description of Artificial Sequence: Synthetic oligonucleotide
  misc_feature 1..20: note = Target: SCN10A; (+) strand; PAM type: YTN; PAM sequence: TTT
  source 1..20: mol_type = other DNA
tggtaaaatatgcataatat

SEQ ID NO: 71544 - DNA, 20 bp, synthetic construct
  misc_feature 1..20: note = Description of Artificial Sequence: Synthetic oligonucleotide
  misc_feature 1..20: note = Target: SCN10A; (+) strand; PAM type: YTN; PAM sequence: TTT
  source 1..20: mol_type = other DNA
ggtaaaatatgcataatata

SEQ ID NO: 71545 - DNA, 20 bp, synthetic construct
  misc_feature 1..20: note = Description of Artificial Sequence: Synthetic oligonucleotide
  misc_feature 1..20: note = Target: SCN10A; (+) strand; PAM type: YTN; PAM sequence: TTG
  source 1..20: mol_type = other DNA
gtaaaatatgcataatatac

SEQ ID NO: 71546 - DNA, 20 bp, synthetic construct
  misc_feature 1..20: note = Description of Artificial Sequence: Synthetic oligonucleotide
  misc_feature 1..20: note = Target: SCN10A; (+) strand; PAM type: YTN; PAM sequence: TTT
  source 1..20: mol_type = other DNA
accactttcaccatttttaa

SEQ ID NO: 71547 - DNA, 20 bp, synthetic construct
  misc_feature 1..20: note = Description of Artificial Sequence: Synthetic oligonucleotide
  misc_feature 1..20: note = Target: SCN10A; (+) strand; PAM type: YTN; PAM sequence: TTA
  source 1..20: mol_type = other DNA
ccactttcaccatttttaag

SEQ ID NO: 71548 - DNA, 20 bp, synthetic construct
  misc_feature 1..20: note = Description of Artificial Sequence: Synthetic oligonucleotide
  misc_feature 1..20: note = Target: SCN10A; (+) strand; PAM type: YTN; PAM sequence: CTT
  source 1..20: mol_type = other DNA
tcaccatttttaagtacaca

SEQ ID NO: 71549 - DNA, 20 bp, synthetic construct
  misc_feature 1..20: note = Description of Artificial Sequence: Synthetic oligonucleotide
  misc_feature 1..20: note = Target: SCN10A; (+) strand; PAM type: YTN; PAM sequence: TTT
  source 1..20: mol_type = other DNA
caccatttttaagtacacaa

SEQ ID NO: 71550 - DNA, 20 bp, synthetic construct
  misc_feature 1..20: note = Description of Artificial Sequence: Synthetic oligonucleotide
  misc_feature 1..20: note = Target: SCN10A; (+) strand; PAM type: YTN; PAM sequence: TTC
  source 1..20: mol_type = other DNA
accatttttaagtacacaat

SEQ ID NO: 71551 - DNA, 20 bp, synthetic construct
  misc_feature 1..20: note = Description of Artificial Sequence: Synthetic oligonucleotide
  misc_feature 1..20: note = Target: SCN10A; (+) strand; PAM type: YTN; PAM sequence: TTT
  source 1..20: mol_type = other DNA
ttaagtacacaatttagtgg

SEQ ID NO: 71552 - DNA, 20 bp, synthetic construct
  misc_feature 1..20: note = Description of Artificial Sequence: Synthetic oligonucleotide
  misc_feature 1..20: note = Target: SCN10A; (+) strand; PAM type: YTN; PAM sequence: TTT
  source 1..20: mol_type = other DNA
taagtacacaatttagtggc

SEQ ID NO: 71553 - DNA, 20 bp, synthetic construct
  misc_feature 1..20: note = Description of Artificial Sequence: Synthetic oligonucleotide
  misc_feature 1..20: note = Target: SCN10A; (+) strand; PAM type: YTN; PAM sequence: TTT
  source 1..20: mol_type = other DNA
aagtacacaatttagtggca

SEQ ID NO: 71554 - DNA, 20 bp, synthetic construct
  misc_feature 1..20: note = Description of Artificial Sequence: Synthetic oligonucleotide
  misc_feature 1..20: note = Target: SCN10A; (+) strand; PAM type: YTN; PAM sequence: TTA
  source 1..20: mol_type = other DNA
agtacacaatttagtggcat

SEQ ID NO: 71555 - DNA, 20 bp, synthetic construct
  misc_feature 1..20: note = Description of Artificial Sequence: Synthetic oligonucleotide
  misc_feature 1..20: note = Target: SCN10A; (+) strand; PAM type: YTN; PAM sequence: TTT
  source 1..20: mol_type = other DNA
agtggcattaagtacattca

SEQ ID NO: 71556 - DNA, 20 bp, synthetic construct
  misc_feature 1..20: note = Description of Artificial Sequence: Synthetic oligonucleotide
  misc_feature 1..20: note = Target: SCN10A; (+) strand; PAM type: YTN; PAM sequence: TTA
  source 1..20: mol_type = other DNA
gtggcattaagtacattcag

SEQ ID NO: 71557 - DNA, 20 bp, synthetic construct
  misc_feature 1..20: note = Description of Artificial Sequence: Synthetic oligonucleotide
  misc_feature 1..20: note = Target: SCN10A; (+) strand; PAM type: YTN; PAM sequence: TTA
  source 1..20: mol_type = other DNA
agtacattcagtattgtgga

SEQ ID NO: 71558 - DNA, 20 bp, synthetic construct
  misc_feature 1..20: note = Description of Artificial Sequence: Synthetic oligonucleotide
  misc_feature 1..20: note = Target: SCN10A; (+) strand; PAM type: YTN; PAM sequence: TTC
  source 1..20: mol_type = other DNA
agtattgtggaactatcacc

SEQ ID NO: 71559 - DNA, 20 bp, synthetic construct
  misc_feature 1..20: note = Description of Artificial Sequence: Synthetic oligonucleotide
  misc_feature 1..20: note = Target: SCN10A; (+) strand; PAM type: YTN; PAM sequence: TTG
  source 1..20: mol_type = other DNA
tggaactatcaccactatct

SEQ ID NO: 71560 - DNA, 20 bp, synthetic construct
  misc_feature 1..20: note = Description of Artificial Sequence: Synthetic oligonucleotide
  misc_feature 1..20: note = Target: SCN10A; (+) strand; PAM type: YTN; PAM sequence: CTA
  source 1..20: mol_type = other DNA
tcaccactatctgtttccaa

SEQ ID NO: 71561 - DNA, 20 bp, synthetic construct
  misc_feature 1..20: note = Description of Artificial Sequence: Synthetic oligonucleotide
  misc_feature 1..20: note = Target: SCN10A; (+) strand; PAM type: YTN; PAM sequence: CTA
  source 1..20: mol_type = other DNA
tctgtttccaaactttttta

SEQ ID NO: 71562 - DNA, 20 bp, synthetic construct
  misc_feature 1..20: note = Description of Artificial Sequence: Synthetic oligonucleotide
  misc_feature 1..20: note = Target: SCN10A; (+) strand; PAM type: YTN; PAM sequence: CTG
  source 1..20: mol_type = other DNA
tttccaaacttttttataat

SEQ ID NO: 71563 - DNA, 20 bp, synthetic construct
  misc_feature 1..20: note = Description of Artificial Sequence: Synthetic oligonucleotide
  misc_feature 1..20: note = Target: SCN10A; (+) strand; PAM type: YTN; PAM sequence: TTT
  source 1..20: mol_type = other DNA
ccaaacttttttataatccc

SEQ ID NO: 71564 - DNA, 20 bp, synthetic construct
  misc_feature 1..20: note = Description of Artificial Sequence: Synthetic oligonucleotide
  misc_feature 1..20: note = Target: SCN10A; (+) strand; PAM type: YTN; PAM sequence: TTC
  source 1..20: mol_type = other DNA
caaacttttttataatcccg

SEQ ID NO: 71565 - DNA, 20 bp, synthetic construct
  misc_feature 1..20: note = Description of Artificial Sequence: Synthetic oligonucleotide
  misc_feature 1..20: note = Target: SCN10A; (+) strand; PAM type: YTN; PAM sequence: CTT
  source 1..20: mol_type = other DNA
ttttataatcccgaacagaa

SEQ ID NO: 71566 - DNA, 20 bp, synthetic construct
  misc_feature 1..20: note = Description of Artificial Sequence: Synthetic oligonucleotide
  misc_feature 1..20: note = Target: SCN10A; (+) strand; PAM type: YTN; PAM sequence: TTT
  source 1..20: mol_type = other DNA
tttataatcccgaacagaaa

SEQ ID NO: 71567 - DNA, 20 bp, synthetic construct
  misc_feature 1..20: note = Description of Artificial Sequence: Synthetic oligonucleotide
  misc_feature 1..20: note = Target: SCN10A; (+) strand; PAM type: YTN; PAM sequence: TTT
  source 1..20: mol_type = other DNA
ttataatcccgaacagaaat

SEQ ID NO: 71568 - DNA, 20 bp, synthetic construct
  misc_feature 1..20: note = Description of Artificial Sequence: Synthetic oligonucleotide
  misc_feature 1..20: note = Target: SCN10A; (+) strand; PAM type: YTN; PAM sequence: TTT
  source 1..20: mol_type = other DNA
tataatcccgaacagaaatg

SEQ ID NO: 71569 - DNA, 20 bp, synthetic construct
  misc_feature 1..20: note = Description of Artificial Sequence: Synthetic oligonucleotide
  misc_feature 1..20: note = Target: SCN10A; (+) strand; PAM type: YTN; PAM sequence: TTT
  source 1..20: mol_type = other DNA
ataatcccgaacagaaatgt

SEQ ID NO: 71570 - DNA, 20 bp, synthetic construct
  misc_feature 1..20: note = Description of Artificial Sequence: Synthetic oligonucleotide
  misc_feature 1..20: note = Target: SCN10A; (+) strand; PAM type: YTN; PAM sequence: TTA
  source 1..20: mol_type = other DNA
taatcccgaacagaaatgta

SEQ ID NO: 71571 - DNA, 20 bp, synthetic construct
  misc_feature 1..20: note = Description of Artificial Sequence: Synthetic oligonucleotide
  misc_feature 1..20: note = Target: SCN10A; (+) strand; PAM type: YTN; PAM sequence: TTA
  source 1..20: mol_type = other DNA
aataataactccccattccc

SEQ ID NO: 71572 - DNA, 20 bp, synthetic construct
  misc_feature 1..20: note = Description of Artificial Sequence: Synthetic oligonucleotide
  misc_feature 1..20: note = Target: SCN10A; (+) strand; PAM type: YTN; PAM sequence: CTC
  source 1..20: mol_type = other DNA
cccattccccctctctggca

SEQ ID NO: 71573 - DNA, 20 bp, synthetic construct
  misc_feature 1..20: note = Description of Artificial Sequence: Synthetic oligonucleotide
  misc_feature 1..20: note = Target: SCN10A; (+) strand; PAM type: YTN; PAM sequence: TTC
  source 1..20: mol_type = other DNA
cccctctctggcaacttcca

SEQ ID NO: 71574 - DNA, 20 bp, synthetic construct
  misc_feature 1..20: note = Description of Artificial Sequence: Synthetic oligonucleotide
  misc_feature 1..20: note = Target: SCN10A; (+) strand; PAM type: YTN; PAM sequence: CTC
  source 1..20: mol_type = other DNA
tctggcaacttccattctac

SEQ ID NO: 71575 - DNA, 20 bp, synthetic construct
  misc_feature 1..20: note = Description of Artificial Sequence: Synthetic oligonucleotide
  misc_feature 1..20: note = Target: SCN10A; (+) strand; PAM type: YTN; PAM sequence: CTC
  source 1..20: mol_type = other DNA
tggcaacttccattctactt

SEQ ID NO: 71576 - DNA, 20 bp, synthetic construct
  misc_feature 1..20: note = Description of Artificial Sequence: Synthetic oligonucleotide
  misc_feature 1..20: note = Target: SCN10A; (+) strand; PAM type: YTN; PAM sequence: CTG
  source 1..20: mol_type = other DNA
gcaacttccattctactttc

SEQ ID NO: 71577 - DNA, 20 bp, synthetic construct
  misc_feature 1..20: note = Description of Artificial Sequence: Synthetic oligonucleotide
  misc_feature 1..20: note = Target: SCN10A; (+) strand; PAM type: YTN; PAM sequence: CTT
  source 1..20: mol_type = other DNA
ccattctactttctgtctcc

SEQ ID NO: 71578 - DNA, 20 bp, synthetic construct
  misc_feature 1..20: note = Description of Artificial Sequence: Synthetic oligonucleotide
  misc_feature 1..20: note = Target: SCN10A; (+) strand; PAM type: YTN; PAM sequence: TTC
  source 1..20: mol_type = other DNA
cattctactttctgtctcca

SEQ ID NO: 71579 - DNA, 20 bp, synthetic construct
  misc_feature 1..20: note = Description of Artificial Sequence: Synthetic oligonucleotide
  misc_feature 1..20: note = Target: SCN10A; (+) strand; PAM type: YTN; PAM sequence: TTC
  source 1..20: mol_type = other DNA
tactttctgtctccatgaat

SEQ ID NO: 71580 - DNA, 20 bp, synthetic construct
  misc_feature 1..20: note = Description of Artificial Sequence: Synthetic oligonucleotide
  misc_feature 1..20: note = Target: SCN10A; (+) strand; PAM type: YTN; PAM sequence: CTA
  source 1..20: mol_type = other DNA
ctttctgtctccatgaattt

SEQ ID NO: 71581 - DNA, 20 bp, synthetic construct
  misc_feature 1..20: note = Description of Artificial Sequence: Synthetic oligonucleotide
  misc_feature 1..20: note = Target: SCN10A; (+) strand; PAM type: YTN; PAM sequence: CTT
  source 1..20: mol_type = other DNA
tctgtctccatgaatttgcc

SEQ ID NO: 71582 - DNA, 20 bp, synthetic construct
  misc_feature 1..20: note = Description of Artificial Sequence: Synthetic oligonucleotide
  misc_feature 1..20: note = Target: SCN10A; (+) strand; PAM type: YTN; PAM sequence: TTT
  source 1..20: mol_type = other DNA
ctgtctccatgaatttgcct

SEQ ID NO: 71583 - DNA, 20 bp, synthetic construct
  misc_feature 1..20: note = Description of Artificial Sequence: Synthetic oligonucleotide
  misc_feature 1..20: note = Target: SCN10A; (+) strand; PAM type: YTN; PAM sequence: TTC
  source 1..20: mol_type = other DNA
tgtctccatgaatttgcctg

SEQ ID NO: 71584 - DNA, 20 bp, synthetic construct
  misc_feature 1..20: note = Description of Artificial Sequence: Synthetic oligonucleotide
  misc_feature 1..20: note = Target: SCN10A; (+) strand; PAM type: YTN; PAM sequence: CTG
  source 1..20: mol_type = other DNA
tctccatgaatttgcctgtt

SEQ ID NO: 71585 - DNA, 20 bp, synthetic construct
  misc_feature 1..20: note = Description of Artificial Sequence: Synthetic oligonucleotide
  misc_feature 1..20: note = Target: SCN10A; (+) strand; PAM type: YTN; PAM sequence: CTC
  source 1..20: mol_type = other DNA
catgaatttgcctgttctag

SEQ ID NO: 71586 - DNA, 20 bp, synthetic construct
  misc_feature 1..20: note = Description of Artificial Sequence: Synthetic oligonucleotide
  misc_feature 1..20: note = Target: SCN10A; (+) strand; PAM type: YTN; PAM sequence: TTT
  source 1..20: mol_type = other DNA
gcctgttctaggtacctact

SEQ ID NO: 71587 - DNA, 20 bp, synthetic construct
  misc_feature 1..20: note = Description of Artificial Sequence: Synthetic oligonucleotide
  misc_feature 1..20: note = Target: SCN10A; (+) strand; PAM type: YTN; PAM sequence: TTG
  source 1..20: mol_type = other DNA
cctgttctaggtacctacta

SEQ ID NO: 71588 - DNA, 20 bp, synthetic construct
  misc_feature 1..20: note = Description of Artificial Sequence: Synthetic oligonucleotide
  misc_feature 1..20: note = Target: SCN10A; (+) strand; PAM type: YTN; PAM sequence: CTG
  source 1..20: mol_type = other DNA
ttctaggtacctactaaagg

SEQ ID NO: 71589 - DNA, 20 bp, synthetic construct
  misc_feature 1..20: note = Description of Artificial Sequence: Synthetic oligonucleotide
  misc_feature 1..20: note = Target: SCN10A; (+) strand; PAM type: YTN; PAM sequence: TTC
  source 1..20: mol_type = other DNA
taggtacctactaaaggtgg

SEQ ID NO: 71590 - DNA, 20 bp, synthetic construct
  misc_feature 1..20: note = Description of Artificial Sequence: Synthetic oligonucleotide
  misc_feature 1..20: note = Target: SCN10A; (+) strand; PAM type: YTN; PAM sequence: CTA
  source 1..20: mol_type = other DNA
ggtacctactaaaggtggaa

SEQ ID NO: 71591 - DNA, 20 bp, synthetic construct
  misc_feature 1..20: note = Description of Artificial Sequence: Synthetic oligonucleotide
  misc_feature 1..20: note = Target: SCN10A; (+) strand; PAM type: YTN; PAM sequence: CTA
  source 1..20: mol_type = other DNA
ctaaaggtggaatcatgcaa

SEQ ID NO: 71592 - DNA, 20 bp, synthetic construct
  misc_feature 1..20: note = Description of Artificial Sequence: Synthetic oligonucleotide
  misc_feature 1..20: note = Target: SCN10A; (+) strand; PAM type: YTN; PAM sequence: CTA
  source 1..20: mol_type = other DNA
aaggtggaatcatgcaacat

SEQ ID NO: 71593 - DNA, 20 bp, synthetic construct
  misc_feature 1..20: note = Description of Artificial Sequence: Synthetic oligonucleotide
  misc_feature 1..20: note = Target: SCN10A; (+) strand; PAM type: YTN; PAM sequence: TTT
  source 1..20: mol_type = other DNA
gttcttttgcgtttgagtta

SEQ ID NO: 71594 - DNA, 20 bp, synthetic construct
  misc_feature 1..20: note = Description of Artificial Sequence: Synthetic oligonucleotide
  misc_feature 1..20: note = Target: SCN10A; (+) strand; PAM type: YTN; PAM sequence: TTG
  source 1..20: mol_type = other DNA
ttcttttgcgtttgagttat

SEQ ID NO: 71595 - DNA, 20 bp, synthetic construct
  misc_feature 1..20: note = Description of Artificial Sequence: Synthetic oligonucleotide
  misc_feature 1..20: note = Target: SCN10A; (+) strand; PAM type: YTN; PAM sequence: TTC
  source 1..20: mol_type = other DNA
ttttgcgtttgagttatttt

SEQ ID NO: 71596 - DNA, 20 bp, synthetic construct
  misc_feature 1..20: note = Description of Artificial Sequence: Synthetic oligonucleotide
  misc_feature 1..20: note = Target: SCN10A; (+) strand; PAM type: YTN; PAM sequence: CTT
  source 1..20: mol_type = other DNA
ttgcgtttgagttattttac

SEQ ID NO: 71597 - DNA, 20 bp, synthetic construct
  misc_feature 1..20: note = Description of Artificial Sequence: Synthetic oligonucleotide
  misc_feature 1..20: note = Target: SCN10A; (+) strand; PAM type: YTN; PAM sequence: TTT
  source 1..20: mol_type = other DNA
tgcgtttgagttattttact

SEQ ID NO: 71598 - DNA, 20 bp, synthetic construct
  misc_feature 1..20: note = Description of Artificial Sequence: Synthetic oligonucleotide
  misc_feature 1..20: note = Target: SCN10A; (+) strand; PAM type: YTN; PAM sequence: TTT
  source 1..20: mol_type = other DNA
gcgtttgagttattttactt

SEQ ID NO: 71599 - DNA, 20 bp, synthetic construct
  misc_feature 1..20: note = Description of Artificial Sequence: Synthetic oligonucleotide
  misc_feature 1..20: note = Target: SCN10A; (+) strand; PAM type: YTN; PAM sequence: TTG
  source 1..20: mol_type = other DNA
cgtttgagttattttactta

SEQ ID NO: 71600 - DNA, 20 bp, synthetic construct
  misc_feature 1..20: note = Description of Artificial Sequence: Synthetic oligonucleotide
  misc_feature 1..20: note = Target: SCN10A; (+) strand; PAM type: YTN; PAM sequence: TTT
  source 1..20: mol_type = other DNA
gagttattttacttagcaca

SEQ ID NO: 71601 - DNA, 20 bp, synthetic construct
  misc_feature 1..20: note = Description of Artificial Sequence: Synthetic oligonucleotide
  misc_feature 1..20: note = Target: SCN10A; (+) strand; PAM type: YTN; PAM sequence: TTG
  source 1..20: mol_type = other DNA
agttattttacttagcacaa

SEQ ID NO: 71602 - DNA, 20 bp, synthetic construct
  misc_feature 1..20: note = Description of Artificial Sequence: Synthetic oligonucleotide
  misc_feature 1..20: note = Target: SCN10A; (+) strand; PAM type: YTN; PAM sequence: TTA
  source 1..20: mol_type = other DNA
ttttacttagcacaatgctt

SEQ ID NO: 71603 - DNA, 20 bp, synthetic construct
  misc_feature 1..20: note = Description of Artificial Sequence: Synthetic oligonucleotide
  misc_feature 1..20: note = Target: SCN10A; (+) strand; PAM type: YTN; PAM sequence: TTT
  source 1..20: mol_type = other DNA
tacttagcacaatgctttgt

SEQ ID NO: 71604 - DNA, 20 bp, synthetic construct
  misc_feature 1..20: note = Description of Artificial Sequence: Synthetic oligonucleotide
  misc_feature 1..20: note = Target: SCN10A; (+) strand; PAM type: YTN; PAM sequence: TTT
  source 1..20: mol_type = other DNA
acttagcacaatgctttgtc

SEQ ID NO: 71605 - DNA, 20 bp, synthetic construct
  misc_feature 1..20: note = Description of Artificial Sequence: Synthetic oligonucleotide
  misc_feature 1..20: note = Target: SCN10A; (+) strand; PAM type: YTN; PAM sequence: TTA
  source 1..20: mol_type = other DNA
cttagcacaatgctttgtca

SEQ ID NO: 71606 - DNA, 20 bp, synthetic construct
  misc_feature 1..20: note = Description of Artificial Sequence: Synthetic oligonucleotide
  misc_feature 1..20: note = Target: SCN10A; (+) strand; PAM type: YTN; PAM sequence: CTT
  source 1..20: mol_type = other DNA
agcacaatgctttgtcaatg

SEQ ID NO: 71607 - DNA, 20 bp, synthetic construct
  misc_feature 1..20: note = Description of Artificial Sequence: Synthetic oligonucleotide
  misc_feature 1..20: note = Target: SCN10A; (+) strand; PAM type: YTN; PAM sequence: TTA
  source 1..20: mol_type = other DNA
gcacaatgctttgtcaatgt

SEQ ID NO: 71608 - DNA, 20 bp, synthetic construct
  misc_feature 1..20: note = Description of Artificial Sequence: Synthetic oligonucleotide
  misc_feature 1..20: note = Target: SCN10A; (+) strand; PAM type: YTN; PAM sequence: CTT
  source 1..20: mol_type = other DNA
tgtcaatgttgtggcatgta

SEQ ID NO: 71609 - DNA, 20 bp, synthetic construct
  misc_feature 1..20: note = Description of Artificial Sequence: Synthetic oligonucleotide
  misc_feature 1..20: note = Target: SCN10A; (+) strand; PAM type: YTN; PAM sequence: TTT
  source 1..20: mol_type = other DNA
gtcaatgttgtggcatgtat

SEQ ID NO: 71610 - DNA, 20 bp, synthetic construct
  misc_feature 1..20: note = Description of Artificial Sequence: Synthetic oligonucleotide
  misc_feature 1..20: note = Target: SCN10A; (+) strand; PAM type: YTN; PAM sequence: TTG
  source 1..20: mol_type = other DNA
tcaatgttgtggcatgtatc

SEQ ID NO: 71611 - DNA, 20 bp, synthetic construct
  misc_feature 1..20: note = Description of Artificial Sequence: Synthetic oligonucleotide
  misc_feature 1..20: note = Target: SCN10A; (+) strand; PAM type: YTN; PAM sequence: TTG
  source 1..20: mol_type = other DNA
tggcatgtatcagaatctca

SEQ ID NO: 71612 - DNA, 20 bp, synthetic construct
  misc_feature 1..20: note = Description of Artificial Sequence: Synthetic oligonucleotide
  misc_feature 1..20: note = Target: SCN10A; (+) strand; PAM type: YTN; PAM sequence: CTC
  source 1..20: mol_type = other DNA
attcatttttaaaactgaat

SEQ ID NO: 71613 - DNA, 20 bp, synthetic construct
  misc_feature 1..20: note = Description of Artificial Sequence: Synthetic oligonucleotide
  misc_feature 1..20: note = Target: SCN10A; (+) strand; PAM type: YTN; PAM sequence: TTC
  source 1..20: mol_type = other DNA
atttttaaaactgaatgata

SEQ ID NO: 71614 - DNA, 20 bp, synthetic construct
  misc_feature 1..20: note = Description of Artificial Sequence: Synthetic oligonucleotide
  misc_feature 1..20: note = Target: SCN10A; (+) strand; PAM type: YTN; PAM sequence: TTT
  source 1..20: mol_type = other DNA
ttaaaactgaatgatattca

SEQ ID NO: 71615 - DNA, 20 bp, synthetic construct
  misc_feature 1..20: note = Description of Artificial Sequence: Synthetic oligonucleotide
  misc_feature 1..20: note = Target: SCN10A; (+) strand; PAM type: YTN; PAM sequence: TTT
  source 1..20: mol_type = other DNA
taaaactgaatgatattcaa

SEQ ID NO: 71616 - DNA, 20 bp, synthetic construct
  misc_feature 1..20: note = Description of Artificial Sequence: Synthetic oligonucleotide
  misc_feature 1..20: note = Target: SCN10A; (+) strand; PAM type: YTN; PAM sequence: TTT
  source 1..20: mol_type = other DNA
aaaactgaatgatattcaat

SEQ ID NO: 71617 - DNA, 20 bp, synthetic construct
  misc_feature 1..20: note = Description of Artificial Sequence: Synthetic oligonucleotide
  misc_feature 1..20: note = Target: SCN10A; (+) strand; PAM type: YTN; PAM sequence: TTA
  source 1..20: mol_type = other DNA
aaactgaatgatattcaatt

SEQ ID NO: 71618 - DNA, 20 bp, synthetic construct
  misc_feature 1..20: note = Description of Artificial Sequence: Synthetic oligonucleotide
  misc_feature 1..20: note = Target: SCN10A; (+) strand; PAM type: YTN; PAM sequence: CTG
  source 1..20: mol_type = other DNA
aatgatattcaattgtttac

SEQ ID NO: 71619 - DNA, 20 bp, synthetic construct
  misc_feature 1..20: note = Description of Artificial Sequence: Synthetic oligonucleotide
  misc_feature 1..20: note = Target: SCN10A; (+) strand; PAM type: YTN; PAM sequence: TTC
  source 1..20: mol_type = other DNA
aattgtttacatatatacta

SEQ ID NO: 71620 - DNA, 20 bp, synthetic construct
  misc_feature 1..20: note = Description of Artificial Sequence: Synthetic oligonucleotide
  misc_feature 1..20: note = Target: SCN10A; (+) strand; PAM type: YTN; PAM sequence: TTG
  source 1..20: mol_type = other DNA
tttacatatatactacattt

SEQ ID NO: 71621 - DNA, 20 bp, synthetic construct
  misc_feature 1..20: note = Description of Artificial Sequence: Synthetic oligonucleotide
  misc_feature 1..20: note = Target: SCN10A; (+) strand; PAM type: YTN; PAM sequence: TTT
  source 1..20: mol_type = other DNA
acatatatactacatttttt

SEQ ID NO: 71622 - DNA, 20 bp, synthetic construct
  misc_feature 1..20: note = Description of Artificial Sequence: Synthetic oligonucleotide
  misc_feature 1..20: note = Target: SCN10A; (+) strand; PAM type: YTN; PAM sequence: TTA
  source 1..20: mol_type = other DNA
catatatactacatttttta

SEQ ID NO: 71623 - DNA, 20 bp, synthetic construct
  misc_feature 1..20: note = Description of Artificial Sequence: Synthetic oligonucleotide
  misc_feature 1..20: note = Target: SCN10A; (+) strand; PAM type: YTN; PAM sequence: CTA
  source 1..20: mol_type = other DNA
cattttttatccattcatct

SEQ ID NO: 71624 - DNA, 20 bp, synthetic construct
  misc_feature 1..20: note = Description of Artificial Sequence: Synthetic oligonucleotide
  misc_feature 1..20: note = Target: SCN10A; (+) strand; PAM type: YTN; PAM sequence: TTT
  source 1..20: mol_type = other DNA
tttatccattcatctgttga

SEQ ID NO: 71625 - DNA, 20 bp, synthetic construct
  misc_feature 1..20: note = Description of Artificial Sequence: Synthetic oligonucleotide
  misc_feature 1..20: note = Target: SCN10A; (+) strand; PAM type: YTN; PAM sequence: TTT
  source 1..20: mol_type = other DNA
ttatccattcatctgttgat

SEQ ID NO: 71626 - DNA, 20 bp, synthetic construct
  misc_feature 1..20: note = Description of Artificial Sequence: Synthetic oligonucleotide
  misc_feature 1..20: note = Target: SCN10A; (+) strand; PAM type: YTN; PAM sequence: TTT
  source 1..20: mol_type = other DNA
tatccattcatctgttgatg

SEQ ID NO: 71627 - DNA, 20 bp, synthetic construct
  misc_feature 1..20: note = Description of Artificial Sequence: Synthetic oligonucleotide
  misc_feature 1..20: note = Target: SCN10A; (+) strand; PAM type: YTN; PAM sequence: TTT
  source 1..20: mol_type = other DNA
atccattcatctgttgatgg

SEQ ID NO: 71628 - DNA, 20 bp, synthetic construct
  misc_feature 1..20: note = Description of Artificial Sequence: Synthetic oligonucleotide
  misc_feature 1..20: note = Target: SCN10A; (+) strand; PAM type: YTN; PAM sequence: TTA
  source 1..20: mol_type = other DNA
tccattcatctgttgatgga

SEQ ID NO: 71629 - DNA, 20 bp, synthetic construct
  misc_feature 1..20: note = Description of Artificial Sequence: Synthetic oligonucleotide
  misc_feature 1..20: note = Target: SCN10A; (+) strand; PAM type: YTN; PAM sequence: TTC
  source 1..20: mol_type = other DNA
atctgttgatggacatattt

SEQ ID NO: 71630 - DNA, 20 bp, synthetic construct
  misc_feature 1..20: note = Description of Artificial Sequence: Synthetic oligonucleotide
  misc_feature 1..20: note = Target: SCN10A; (+) strand; PAM type: YTN; PAM sequence: CTG
  source 1..20: mol_type = other DNA
ttgatggacatatttggcta

SEQ ID NO: 71631 - DNA, 20 bp, synthetic construct
  misc_feature 1..20: note = Description of Artificial Sequence: Synthetic oligonucleotide
  misc_feature 1..20: note = Target: SCN10A; (+) strand; PAM type: YTN; PAM sequence: TTG
  source 1..20: mol_type = other DNA
atggacatatttggctattg

SEQ ID NO: 71632 - DNA, 20 bp, synthetic construct
  misc_feature 1..20: note = Description of Artificial Sequence: Synthetic oligonucleotide
  misc_feature 1..20: note = Target: SCN10A; (+) strand; PAM type: YTN; PAM sequence: TTT
  source 1..20: mol_type = other DNA
ggctattgtgaataacgctg

SEQ ID NO: 71633 - DNA, 20 bp, synthetic construct
  misc_feature 1..20: note = Description of Artificial Sequence: Synthetic oligonucleotide
  misc_feature 1..20: note = Target: SCN10A; (+) strand; PAM type: YTN; PAM sequence: TTG
  source 1..20: mol_type = other DNA
gctattgtgaataacgctgc

SEQ ID NO: 71634 - DNA, 20 bp, synthetic construct
  misc_feature 1..20: note = Description of Artificial Sequence: Synthetic oligonucleotide
  misc_feature 1..20: note = Target: SCN10A; (+) strand; PAM type: YTN; PAM sequence: CTA
  source 1..20: mol_type = other DNA
ttgtgaataacgctgctaca

SEQ ID NO: 71635 - DNA, 20 bp, synthetic construct
  misc_feature 1..20: note = Description of Artificial Sequence: Synthetic oligonucleotide
  misc_feature 1..20: note = Target: SCN10A; (+) strand; PAM type: YTN; PAM sequence: TTG
  source 1..20: mol_type = other DNA
tgaataacgctgctacaaac

SEQ ID NO: 71636 - DNA, 20 bp, synthetic construct
  misc_feature 1..20: note = Description of Artificial Sequence: Synthetic oligonucleotide
  misc_feature 1..20: note = Target: SCN10A; (+) strand; PAM type: YTN; PAM sequence: CTG
  source 1..20: mol_type = other DNA
ctacaaacattagtgcataa

SEQ ID NO: 71637 - DNA, 20 bp, synthetic construct
  misc_feature 1..20: note = Description of Artificial Sequence: Synthetic oligonucleotide
  misc_feature 1..20: note = Target: SCN10A; (+) strand; PAM type: YTN; PAM sequence: CTA
  source 1..20: mol_type = other DNA
caaacattagtgcataagcc

SEQ ID NO: 71638 - DNA, 20 bp, synthetic construct
  misc_feature 1..20: note = Description of Artificial Sequence: Synthetic oligonucleotide
  misc_feature 1..20: note = Target: SCN10A; (+) strand; PAM type: YTN; PAM sequence: TTA
  source 1..20: mol_type = other DNA
gtgcataagccaacatacct

SEQ ID NO: 71639 - DNA, 20 bp, synthetic construct
  misc_feature 1..20: note = Description of Artificial Sequence: Synthetic oligonucleotide
  misc_feature 1..20: note = Target: SCN10A; (+) strand; PAM type: YTN; PAM sequence: CTT
  source 1..20: mol_type = other DNA
ttaaagtctgtttcataggt

SEQ ID NO: 71640 - DNA, 20 bp, synthetic construct
  misc_feature 1..20: note = Description of Artificial Sequence: Synthetic oligonucleotide
  misc_feature 1..20: note = Target: SCN10A; (+) strand; PAM type: YTN; PAM sequence: TTT
  source 1..20: mol_type = other DNA
taaagtctgtttcataggtt

SEQ ID NO: 71641 - DNA, 20 bp, synthetic construct
  misc_feature 1..20: note = Description of Artificial Sequence: Synthetic oligonucleotide
  misc_feature 1..20: note = Target: SCN10A; (+) strand; PAM type: YTN; PAM sequence: TTT
  source 1..20: mol_type = other DNA
aaagtctgtttcataggttc

SEQ ID NO: 71642 - DNA, 20 bp, synthetic construct
  misc_feature 1..20: note = Description of Artificial Sequence: Synthetic oligonucleotide
  misc_feature 1..20: note = Target: SCN10A; (+) strand; PAM type: YTN; PAM sequence: TTA
  source 1..20: mol_type = other DNA
aagtctgtttcataggttca

SEQ ID NO: 71643 - DNA, 20 bp, synthetic construct
  misc_feature 1..20: note = Description of Artificial Sequence: Synthetic oligonucleotide
  misc_feature 1..20: note = Target: SCN10A; (+) strand; PAM type: YTN; PAM sequence: CTG
  source 1..20: mol_type = other DNA
tttcataggttcaaactaat

SEQ ID NO: 71644 - DNA, 20 bp, synthetic construct
  misc_feature 1..20: note = Description of Artificial Sequence: Synthetic oligonucleotide
  misc_feature 1..20: note = Target: SCN10A; (+) strand; PAM type: YTN; PAM sequence: TTT
  source 1..20: mol_type = other DNA
cataggttcaaactaatttt

SEQ ID NO: 71645 - DNA, 20 bp, synthetic construct
  misc_feature 1..20: note = Description of Artificial Sequence: Synthetic oligonucleotide
  misc_feature 1..20: note = Target: SCN10A; (+) strand; PAM type: YTN; PAM sequence: TTC
  source 1..20: mol_type = other DNA
ataggttcaaactaattttt

SEQ ID NO: 71646 - DNA, 20 bp, synthetic construct
  misc_feature 1..20: note = Description of Artificial Sequence: Synthetic oligonucleotide
  misc_feature 1..20: note = Target: SCN10A; (+) strand; PAM type: YTN; PAM sequence: TTC
  source 1..20: mol_type = other DNA
aaactaatttttaattaaac

SEQ ID NO: 71647 - DNA, 20 bp, synthetic construct
  misc_feature 1..20: note = Description of Artificial Sequence: Synthetic oligonucleotide
  misc_feature 1..20: note = Target: SCN10A; (+) strand; PAM type: YTN; PAM sequence: CTA
  source 1..20: mol_type = other DNA
atttttaattaaaccagaga

SEQ ID NO: 71648 - DNA, 20 bp, synthetic construct
  misc_feature 1..20: note = Description of Artificial Sequence: Synthetic oligonucleotide
  misc_feature 1..20: note = Target: SCN10A; (+) strand; PAM type: YTN; PAM sequence: TTT
  source 1..20: mol_type = other DNA
ttaattaaaccagagagctc

SEQ ID NO: 71649 - DNA, 20 bp, synthetic construct
  misc_feature 1..20: note = Description of Artificial Sequence: Synthetic oligonucleotide
  misc_feature 1..20: note = Target: SCN10A; (+) strand; PAM type: YTN; PAM sequence: TTT
  source 1..20: mol_type = other DNA
taattaaaccagagagctct

SEQ ID NO: 71650 - DNA, 20 bp, synthetic construct
  misc_feature 1..20: note = Description of Artificial Sequence: Synthetic oligonucleotide
  misc_feature 1..20: note = Target: SCN10A; (+) strand; PAM type: YTN; PAM sequence: TTT
  source 1..20: mol_type = other DNA
aattaaaccagagagctctt

SEQ ID NO: 71651 - DNA, 20 bp, synthetic construct
  misc_feature 1..20: note = Description of Artificial Sequence: Synthetic oligonucleotide
  misc_feature 1..20: note = Target: SCN10A; (+) strand; PAM type: YTN; PAM sequence: TTA
  source 1..20: mol_type = other DNA
attaaaccagagagctcttc

SEQ ID NO: 71652 - DNA, 20 bp, synthetic construct
  misc_feature 1..20: note = Description of Artificial Sequence: Synthetic oligonucleotide
  misc_feature 1..20: note = Target: SCN10A; (+) strand; PAM type: YTN; PAM sequence: TTA
  source 1..20: mol_type = other DNA
aaccagagagctcttctttt

SEQ ID NO: 71653 - DNA, 20 bp, synthetic construct
  misc_feature 1..20: note = Description of Artificial Sequence: Synthetic oligonucleotide
  misc_feature 1..20: note = Target: SCN10A; (+) strand; PAM type: YTN; PAM sequence: CTC
  source 1..20: mol_type = other DNA
ttcttttaaaattagcttca

SEQ ID NO: 71654 - DNA, 20 bp, synthetic construct
  misc_feature 1..20: note = Description of Artificial Sequence: Synthetic oligonucleotide
  misc_feature 1..20: note = Target: SCN10A; (+) strand; PAM type: YTN; PAM sequence: CTT
  source 1..20: mol_type = other DNA
cttttaaaattagcttcatg

SEQ ID NO: 71655 - DNA, 20 bp, synthetic construct
  misc_feature 1..20: note = Description of Artificial Sequence: Synthetic oligonucleotide
  misc_feature 1..20: note = Target: SCN10A; (+) strand; PAM type: YTN; PAM sequence: TTC
  source 1..20: mol_type = other DNA
ttttaaaattagcttcatga

SEQ ID NO: 71656 - DNA, 20 bp, synthetic construct
  misc_feature 1..20: note = Description of Artificial Sequence: Synthetic oligonucleotide
  misc_feature 1..20: note = Target: SCN10A; (+) strand; PAM type: YTN; PAM sequence: CTT
  source 1..20: mol_type = other DNA
ttaaaattagcttcatgata

SEQ ID NO: 71657 - DNA, 20 bp, synthetic construct
  misc_feature 1..20: note = Description of Artificial Sequence: Synthetic oligonucleotide
  misc_feature 1..20: note = Target: SCN10A; (+) strand; PAM type: YTN; PAM sequence: TTT
  source 1..20: mol_type = other DNA
taaaattagcttcatgataa

SEQ ID NO: 71658 - DNA, 20 bp, synthetic construct
  misc_feature 1..20: note = Description of Artificial Sequence: Synthetic oligonucleotide
  misc_feature 1..20: note = Target: SCN10A; (+) strand; PAM type: YTN; PAM sequence: TTT
  source 1..20: mol_type = other DNA
aaaattagcttcatgataaa

SEQ ID NO: 71659 - DNA, 20 bp, synthetic construct
  misc_feature 1..20: note = Description of Artificial Sequence: Synthetic oligonucleotide
  misc_feature 1..20: note = Target: SCN10A; (+) strand; PAM type: YTN; PAM sequence: TTA
  source 1..20: mol_type = other DNA
aaattagcttcatgataaat

SEQ ID NO: 71660 - DNA, 20 bp, synthetic construct
  misc_feature 1..20: note = Description of Artificial Sequence: Synthetic oligonucleotide
  misc_feature 1..20: note = Target: SCN10A; (+) strand; PAM type: YTN; PAM sequence: TTA
  source 1..20: mol_type = other DNA
gcttcatgataaatagaaca

SEQ ID NO: 71661 - DNA, 20 bp, synthetic construct
  misc_feature 1..20: note = Description of Artificial Sequence: Synthetic oligonucleotide
  misc_feature 1..20: note = Target: SCN10A; (+) strand; PAM type: YTN; PAM sequence: CTT
  source 1..20: mol_type = other DNA
catgataaatagaacaaaaa

SEQ ID NO: 71662 - DNA, 20 bp, synthetic construct
  misc_feature 1..20: note = Description of Artificial Sequence: Synthetic oligonucleotide
  misc_feature 1..20: note = Target: SCN10A; (+) strand; PAM type: YTN; PAM sequence: TTC
  source 1..20: mol_type = other DNA
atgataaatagaacaaaaag

SEQ ID NO: 71663 - DNA, 20 bp, synthetic construct
  misc_feature 1..20: note = Description of Artificial Sequence: Synthetic oligonucleotide
  misc_feature 1..20: note = Target: SCN10A; (+) strand; PAM type: YTN; PAM sequence: CTG
  source 1..20: mol_type = other DNA
agtctttcccatatatatag

SEQ ID NO: 71664 - DNA, 20 bp, synthetic construct
  misc_feature 1..20: note = Description of Artificial Sequence: Synthetic oligonucleotide
  misc_feature 1..20: note = Target: SCN10A; (+) strand; PAM type: YTN; PAM sequence: CTT
  source 1..20: mol_type = other DNA
tcccatatatatagtgaaga

SEQ ID NO: 71665 - DNA, 20 bp, synthetic construct
  misc_feature 1..20: note = Description of Artificial Sequence: Synthetic oligonucleotide
  misc_feature 1..20: note = Target: SCN10A; (+) strand; PAM type: YTN; PAM sequence: TTT
  source 1..20: mol_type = other DNA
cccatatatatagtgaagat

SEQ ID NO: 71666 - DNA, 20 bp, synthetic construct
  misc_feature 1..20: note = Description of Artificial Sequence: Synthetic oligonucleotide
  misc_feature 1..20: note = Target: SCN10A; (+) strand; PAM type: YTN; PAM sequence: TTC
  source 1..20: mol_type = other DNA
ccatatatatagtgaagata

SEQ ID NO: 71667 - DNA, 20 bp, synthetic construct
  misc_feature 1..20: note = Description of Artificial Sequence: Synthetic oligonucleotide
  misc_feature 1..20: note = Target: SCN10A; (+) strand; PAM type: YTN; PAM sequence: CTG
  source 1..20: mol_type = other DNA
acaacttacttattcatagt

SEQ ID NO: 71668 - DNA, 20 bp, synthetic construct
  misc_feature 1..20: note = Description of Artificial Sequence: Synthetic oligonucleotide
  misc_feature 1..20: note = Target: SCN10A; (+) strand; PAM type: YTN; PAM sequence: CTT
  source 1..20: mol_type = other DNA
acttattcatagttttgttc

SEQ ID NO: 71669 - DNA, 20 bp, synthetic construct
  misc_feature 1..20: note = Description of Artificial Sequence: Synthetic oligonucleotide
  misc_feature 1..20: note = Target: SCN10A; (+) strand; PAM type: YTN; PAM sequence: TTA
  source 1..20: mol_type = other DNA
cttattcatagttttgttca

SEQ ID NO: 71670 - DNA, 20 bp, synthetic construct
  misc_feature 1..20: note = Description of Artificial Sequence: Synthetic oligonucleotide
  misc_feature 1..20: note = Target: SCN10A; (+) strand; PAM type: YTN; PAM sequence: CTT
  source 1..20: mol_type = other DNA
attcatagttttgttcaact

SEQ ID NO: 71671 - DNA, 20 bp, synthetic construct
  misc_feature 1..20: note = Description of Artificial Sequence: Synthetic oligonucleotide
  misc_feature 1..20: note = Target: SCN10A; (+) strand; PAM type: YTN; PAM sequence: TTA
  source 1..20: mol_type = other DNA
ttcatagttttgttcaacta

SEQ ID NO: 71672 - DNA, 20 bp, synthetic construct
  misc_feature 1..20: note = Description of Artificial Sequence: Synthetic oligonucleotide
  misc_feature 1..20: note = Target: SCN10A; (+) strand; PAM type: YTN; PAM sequence: TTC
  source 1..20: mol_type = other DNA
atagttttgttcaactataa

SEQ ID NO: 71673 - DNA, 20 bp, synthetic construct
  misc_feature 1..20: note = Description of Artificial Sequence: Synthetic oligonucleotide
  misc_feature 1..20: note = Target: SCN10A; (+) strand; PAM type: YTN; PAM sequence: TTT
  source 1..20: mol_type = other DNA
tgttcaactataaaataaaa

SEQ ID NO: 71674 - DNA, 20 bp, synthetic construct
  misc_feature 1..20: note = Description of Artificial Sequence: Synthetic oligonucleotide
  misc_feature 1..20: note = Target: SCN10A; (+) strand; PAM type: YTN; PAM sequence: TTT
  source 1..20: mol_type = other DNA
gttcaactataaaataaaat

SEQ ID NO: 71675 - DNA, 20 bp, synthetic construct
  misc_feature 1..20: note = Description of Artificial Sequence: Synthetic oligonucleotide
  misc_feature 1..20: note = Target: SCN10A; (+) strand; PAM type: YTN; PAM sequence: TTG
  source 1..20: mol_type = other DNA
ttcaactataaaataaaatg

SEQ ID NO: 71676 - DNA, 20 bp, synthetic construct
  misc_feature 1..20: note = Description of Artificial Sequence: Synthetic oligonucleotide
  misc_feature 1..20: note = Target: SCN10A; (+) strand; PAM type: YTN; PAM sequence: TTC
  source 1..20: mol_type = other DNA
aactataaaataaaatgtct

SEQ ID NO: 71677 - DNA, 20 bp, synthetic construct
  misc_feature 1..20: note = Description of Artificial Sequence: Synthetic oligonucleotide
  misc_feature 1..20: note = Target: SCN10A; (+) strand; PAM type: YTN; PAM sequence: CTA
  source 1..20: mol_type = other DNA
taaaataaaatgtctgctcg

SEQ ID NO: 71678 - DNA, 20 bp, synthetic construct
  misc_feature 1..20: note = Description of Artificial Sequence: Synthetic oligonucleotide
  misc_feature 1..20: note = Target: SCN10A; (+) strand; PAM type: YTN; PAM sequence: CTG
  source 1..20: mol_type = other DNA
ctcgtatacctaacagtcat

SEQ ID NO: 71679 - DNA, 20 bp, synthetic construct
  misc_feature 1..20: note = Description of Artificial Sequence: Synthetic oligonucleotide
  misc_feature 1..20: note = Target: SCN10A; (+) strand; PAM type: YTN; PAM sequence: CTC
  source 1..20: mol_type = other DNA
gtatacctaacagtcattga

SEQ ID NO: 71680 - DNA, 20 bp, synthetic construct
  misc_feature 1..20: note = Description of Artificial Sequence: Synthetic oligonucleotide
  misc_feature 1..20: note = Target: SCN10A; (+) strand; PAM type: YTN; PAM sequence: CTA
  source 1..20: mol_type = other DNA
acagtcattgactttaaatg

SEQ ID NO: 71681 - DNA, 20 bp, synthetic construct
  misc_feature 1..20: note = Description of Artificial Sequence: Synthetic oligonucleotide
  misc_feature 1..20: note = Target: SCN10A; (+) strand; PAM type: YTN; PAM sequence: TTG
  source 1..20: mol_type = other DNA
actttaaatgccagtcacat

SEQ ID NO: 71682 - DNA, 20 bp, synthetic construct
  misc_feature 1..20: note = Description of Artificial Sequence: Synthetic oligonucleotide
  misc_feature 1..20: note = Target: SCN10A; (+) strand; PAM type: YTN; PAM sequence: CTT
  source 1..20: mol_type = other DNA
taaatgccagtcacattata

SEQ ID NO: 71683 - DNA, 20 bp, synthetic construct
  misc_feature 1..20: note = Description of Artificial Sequence: Synthetic oligonucleotide
  misc_feature 1..20: note = Target: SCN10A; (+) strand; PAM type: YTN; PAM sequence: TTT
  source 1..20: mol_type = other DNA
aaatgccagtcacattataa

SEQ ID NO: 71684 - DNA, 20 bp, synthetic construct
  misc_feature 1..20: note = Description of Artificial Sequence: Synthetic oligonucleotide
  misc_feature 1..20: note = Target: SCN10A; (+) strand; PAM type: YTN; PAM sequence: TTA
  source 1..20: mol_type = other DNA
aatgccagtcacattataag

SEQ ID NO: 71685 - DNA, 20 bp, synthetic construct
  misc_feature 1..20: note = Description of Artificial Sequence: Synthetic oligonucleotide
  misc_feature 1..20: note = Target: SCN10A; (+) strand; PAM type: YTN; PAM sequence: TTA
  source 1..20: mol_type = other DNA
taaggaatgcaatacttcta

SEQ ID NO: 71686 - DNA, 20 bp, synthetic construct
  misc_feature 1..20: note = Description of Artificial Sequence: Synthetic oligonucleotide
  misc_feature 1..20: note = Target: SCN10A; (+) strand; PAM type: YTN; PAM sequence: CTT
  source 1..20: mol_type = other DNA
ctaattaaggaattatacca

SEQ ID NO: 71687 - DNA, 20 bp, synthetic construct
  misc_feature 1..20: note = Description of Artificial Sequence: Synthetic oligonucleotide
  misc_feature 1..20: note = Target: SCN10A; (+) strand; PAM type: YTN; PAM sequence: TTC
  source 1..20: mol_type = other DNA
taattaaggaattataccaa

SEQ ID NO: 71688 - DNA, 20 bp, synthetic construct
  misc_feature 1..20: note = Description of Artificial Sequence: Synthetic oligonucleotide
  misc_feature 1..20: note = Target: SCN10A; (+) strand; PAM type: YTN; PAM sequence: CTA
  source 1..20: mol_type = other DNA
attaaggaattataccaatt

SEQ ID NO: 71689 - DNA, 20 bp, synthetic construct
  misc_feature 1..20: note = Description of Artificial Sequence: Synthetic oligonucleotide
  misc_feature 1..20: note = Target: SCN10A; (+) strand; PAM type: YTN; PAM sequence: TTA
  source 1..20: mol_type = other DNA
aggaattataccaattgttt

SEQ ID NO: 71690 - DNA, 20 bp, synthetic construct
  misc_feature 1..20: note = Description of Artificial Sequence: Synthetic oligonucleotide
  misc_feature 1..20: note = Target: SCN10A; (+) strand; PAM type: YTN; PAM sequence: TTA
  source 1..20: mol_type = other DNA
taccaattgtttttcttgtt

SEQ ID NO: 71691 - DNA, 20 bp, synthetic construct
  misc_feature 1..20: note = Description of Artificial Sequence: Synthetic oligonucleotide
  misc_feature 1..20: note = Target: SCN10A; (+) strand; PAM type: YTN; PAM sequence: TTG
  source 1..20: mol_type = other DNA
tttttcttgtttcttctcca

SEQ ID NO: 71692 - DNA, 20 bp, synthetic construct
  misc_feature 1..20: note = Description of Artificial Sequence: Synthetic oligonucleotide
  misc_feature 1..20: note = Target: SCN10A; (+) strand; PAM type: YTN; PAM sequence: TTT
  source 1..20: mol_type = other DNA
ttcttgtttcttctccaacc

SEQ ID NO: 71693 - DNA, 20 bp, synthetic construct
  misc_feature 1..20: note = Description of Artificial Sequence: Synthetic oligonucleotide
  misc_feature 1..20: note = Target: SCN10A; (+) strand; PAM type: YTN; PAM sequence: TTT
  source 1..20: mol_type = other DNA
tcttgtttcttctccaacca

SEQ ID NO: 71694 - DNA, 20 bp, synthetic construct
  misc_feature 1..20: note = Description of Artificial Sequence: Synthetic oligonucleotide
  misc_feature 1..20: note = Target: SCN10A; (+) strand; PAM type: YTN; PAM sequence: TTT
  source 1..20: mol_type = other DNA
cttgtttcttctccaaccac

SEQ ID NO: 71695 - DNA, 20 bp, synthetic construct
  misc_feature 1..20: note = Description of Artificial Sequence: Synthetic oligonucleotide
  misc_feature 1..20: note = Target: SCN10A; (+) strand; PAM type: YTN; PAM sequence: TTC
  source 1..20: mol_type = other DNA
ttgtttcttctccaaccaca

SEQ ID NO: 71696 - DNA, 20 bp, synthetic construct
  misc_feature 1..20: note = Description of Artificial Sequence: Synthetic oligonucleotide
  misc_feature 1..20: note = Target: SCN10A; (+) strand; PAM type: YTN; PAM sequence: CTT
  source 1..20: mol_type = other DNA
gtttcttctccaaccacaat

SEQ ID NO: 71697 - DNA, 20 bp, synthetic construct
  misc_feature 1..20: note = Description of Artificial Sequence: Synthetic oligonucleotide
  misc_feature 1..20: note = Target: SCN10A; (+) strand; PAM type: YTN; PAM sequence: TTG
  source 1..20: mol_type = other DNA
tttcttctccaaccacaata

SEQ ID NO: 71698 - DNA, 20 bp, synthetic construct
  misc_feature 1..20: note = Description of Artificial Sequence: Synthetic oligonucleotide
  misc_feature 1..20: note = Target: SCN10A; (+) strand; PAM type: YTN; PAM sequence: TTT
  source 1..20: mol_type = other DNA
cttctccaaccacaatattt

SEQ ID NO: 71699 - DNA, 20 bp, synthetic construct
  misc_feature 1..20: note = Description of Artificial Sequence: Synthetic oligonucleotide
  misc_feature 1..20: note = Target: SCN10A; (+) strand; PAM type: YTN; PAM sequence: TTC
  source 1..20: mol_type = other DNA
ttctccaaccacaatatttg

SEQ ID NO: 71700 - DNA, 20 bp, synthetic construct
  misc_feature 1..20: note = Description of Artificial Sequence: Synthetic oligonucleotide
  misc_feature 1..20: note = Target: SCN10A; (+) strand; PAM type: YTN; PAM sequence: CTT
  source 1..20: mol_type = other DNA
ctccaaccacaatatttgta

SEQ ID NO: 71701 - DNA, 20 bp, synthetic construct
  misc_feature 1..20: note = Description of Artificial Sequence: Synthetic oligonucleotide
  misc_feature 1..20: note = Target: SCN10A; (+) strand; PAM type: YTN; PAM sequence: TTC
  source 1..20: mol_type = other DNA
tccaaccacaatatttgtaa

SEQ ID NO: 71702 - DNA, 20 bp, synthetic construct
  misc_feature 1..20: note = Description of Artificial Sequence: Synthetic oligonucleotide
  misc_feature 1..20: note = Target: SCN10A; (+) strand; PAM type: YTN; PAM sequence: CTC
  source 1..20: mol_type = other DNA
caaccacaatatttgtaatt

SEQ ID NO: 71703 - DNA, 20 bp, synthetic construct
  misc_feature 1..20: note = Description of Artificial Sequence: Synthetic oligonucleotide
  misc_feature 1..20: note = Target: SCN10A; (+) strand; PAM type: YTN; PAM sequence: TTT
  source 1..20: mol_type = other DNA
gtaattgatttggaaactgg

SEQ ID NO: 71704 - DNA, 20 bp, synthetic construct
  misc_feature 1..20: note = Description of Artificial Sequence: Synthetic oligonucleotide
  misc_feature 1..20: note = Target: SCN10A; (+) strand; PAM type: YTN; PAM sequence: TTG
  source 1..20: mol_type = other DNA
taattgatttggaaactggt

SEQ ID NO: 71705 - DNA, 20 bp, synthetic construct
  misc_feature 1..20: note = Description of Artificial Sequence: Synthetic oligonucleotide
  misc_feature 1..20: note = Target: SCN10A; (+) strand; PAM type: YTN; PAM sequence: TTG
  source 1..20: mol_type = other DNA
atttggaaactggttttgta

SEQ ID NO: 71706 - DNA, 20 bp, synthetic construct
  misc_feature 1..20: note = Description of Artificial Sequence: Synthetic oligonucleotide
  misc_feature 1..20: note = Target: SCN10A; (+) strand; PAM type: YTN; PAM sequence: TTT
  source 1..20: mol_type = other DNA
ggaaactggttttgtatctt

SEQ ID NO: 71707 - DNA, 20 bp, synthetic construct
  misc_feature 1..20: note = Description of Artificial Sequence: Synthetic oligonucleotide
  misc_feature 1..20: note = Target: SCN10A; (+) strand; PAM type: YTN; PAM sequence: TTG
  source 1..20: mol_type = other DNA
gaaactggttttgtatctta

SEQ ID NO: 71708 - DNA, 20 bp, synthetic construct
  misc_feature 1..20: note = Description of Artificial Sequence: Synthetic oligonucleotide
  misc_feature 1..20: note = Target: SCN10A; (+) strand; PAM type: YTN; PAM sequence: CTG
  source 1..20: mol_type = other DNA
gttttgtatcttaccagcag

SEQ ID NO: 71709 - DNA, 20 bp, synthetic construct
  misc_feature 1..20: note = Description of Artificial Sequence: Synthetic oligonucleotide
  misc_feature 1..20: note = Target: SCN10A; (+) strand; PAM type: YTN; PAM sequence: TTT
  source 1..20: mol_type = other DNA
tgtatcttaccagcaggagt

SEQ ID NO: 71710 - DNA, 20 bp, synthetic construct
  misc_feature 1..20: note = Description of Artificial Sequence: Synthetic oligonucleotide
  misc_feature 1..20: note = Target: SCN10A; (+) strand; PAM type: YTN; PAM sequence: TTT
  source 1..20: mol_type = other DNA
gtatcttaccagcaggagtg

SEQ ID NO: 71711 - DNA, 20 bp, synthetic construct
  misc_feature 1..20: note = Description of Artificial Sequence: Synthetic oligonucleotide
  misc_feature 1..20: note = Target: SCN10A; (+) strand; PAM type: YTN; PAM sequence: TTG
  source 1..20: mol_type = other DNA
tatcttaccagcaggagtgc

SEQ ID NO: 71712 - DNA, 20 bp, synthetic construct
  misc_feature 1..20: note = Description of Artificial Sequence: Synthetic oligonucleotide
  misc_feature 1..20: note = Target: SCN10A; (+) strand; PAM type: YTN; PAM sequence: CTT
  source 1..20: mol_type = other DNA
accagcaggagtgcaattgt

SEQ ID NO: 71713 - DNA, 20 bp, synthetic construct
  misc_feature 1..20: note = Description of Artificial Sequence: Synthetic oligonucleotide
  misc_feature 1..20: note = Target: SCN10A; (+) strand; PAM type: YTN; PAM sequence: TTA
  source 1..20: mol_type = other DNA
ccagcaggagtgcaattgtg

SEQ ID NO: 71714 - DNA, 20 bp, synthetic construct
  misc_feature 1..20: note = Description of Artificial Sequence: Synthetic oligonucleotide
  misc_feature 1..20: note = Target: SCN10A; (+) strand; PAM type: YTN; PAM sequence: TTG
  source 1..20: mol_type = other DNA
tgcttatttttgatatgagg

SEQ ID NO: 71715 - DNA, 20 bp, synthetic construct
  misc_feature 1..20: note = Description of Artificial Sequence: Synthetic oligonucleotide
  misc_feature 1..20: note = Target: SCN10A; (+) strand; PAM type: YTN; PAM sequence: CTT
  source 1..20: mol_type = other DNA
atttttgatatgaggatgaa

SEQ ID NO: 71716 - DNA, 20 bp, synthetic construct
  misc_feature 1..20: note = Description of Artificial Sequence: Synthetic oligonucleotide
  misc_feature 1..20: note = Target: SCN10A; (+) strand; PAM type: YTN; PAM sequence: TTA
  source 1..20: mol_type = other DNA
tttttgatatgaggatgaat

SEQ ID NO: 71717 - DNA, 20 bp, synthetic construct
  misc_feature 1..20: note = Description of Artificial Sequence: Synthetic oligonucleotide
  misc_feature 1..20: note = Target: SCN10A; (+) strand; PAM type: YTN; PAM sequence: TTT
  source 1..20: mol_type = other DNA
ttgatatgaggatgaatgat

SEQ ID NO: 71718 - DNA, 20 bp, synthetic construct
  misc_feature 1..20: note = Description of Artificial Sequence: Synthetic oligonucleotide
  misc_feature 1..20: note = Target: SCN10A; (+) strand; PAM type: YTN; PAM sequence: TTT
  source 1..20: mol_type = other DNA
tgatatgaggatgaatgatg

SEQ ID NO: 71719 - DNA, 20 bp, synthetic construct
  misc_feature 1..20: note = Description of Artificial Sequence: Synthetic oligonucleotide
  misc_feature 1..20: note = Target: SCN10A; (+) strand; PAM type: YTN; PAM sequence: TTT
  source 1..20: mol_type = other DNA
gatatgaggatgaatgatga

SEQ ID NO: 71720 - DNA, 20 bp, synthetic construct
  misc_feature 1..20: note = Description of Artificial Sequence: Synthetic oligonucleotide
  misc_feature 1..20: note = Target: SCN10A; (+) strand; PAM type: YTN; PAM sequence: TTG
  source 1..20: mol_type = other DNA
atatgaggatgaatgatgac

SEQ ID NO: 71721 - DNA, 20 bp, synthetic construct
  misc_feature 1..20: note = Description of Artificial Sequence: Synthetic oligonucleotide
  misc_feature 1..20: note = Target: SCN10A; (+) strand; PAM type: YTN; PAM sequence: CTC
  source 1..20: mol_type = other DNA
tatagttttgttgtcttctc

SEQ ID NO: 71722 - DNA, 20 bp, synthetic construct
  misc_feature 1..20: note = Description of Artificial Sequence: Synthetic oligonucleotide
  misc_feature 1..20: note = Target: SCN10A; (+) strand; PAM type: YTN; PAM sequence: CTA
  source 1..20: mol_type = other DNA
tagttttgttgtcttctcaa

SEQ ID NO: 71723 - DNA, 20 bp, synthetic construct
  misc_feature 1..20: note = Description of Artificial Sequence: Synthetic oligonucleotide
  misc_feature 1..20: note = Target: SCN10A; (+) strand; PAM type: YTN; PAM sequence: TTT
  source 1..20: mol_type = other DNA
tgttgtcttctcaaccttta

SEQ ID NO: 71724 - DNA, 20 bp, synthetic construct
  misc_feature 1..20: note = Description of Artificial Sequence: Synthetic oligonucleotide
  misc_feature 1..20: note = Target: SCN10A; (+) strand; PAM type: YTN; PAM sequence: TTT
  source 1..20: mol_type = other DNA
gttgtcttctcaacctttaa

SEQ ID NO: 71725 - DNA, 20 bp, synthetic construct
  misc_feature 1..20: note = Description of Artificial Sequence: Synthetic oligonucleotide
  misc_feature 1..20: note = Target: SCN10A; (+) strand; PAM type: YTN; PAM sequence: TTG
  source 1..20: mol_type = other DNA
ttgtcttctcaacctttaac

SEQ ID NO: 71726 - DNA, 20 bp, synthetic construct
  misc_feature 1..20: note = Description of Artificial Sequence: Synthetic oligonucleotide
  misc_feature 1..20: note = Target: SCN10A; (+) strand; PAM type: YTN; PAM sequence: TTG
  source 1..20: mol_type = other DNA
tcttctcaacctttaacata

SEQ ID NO: 71727 - DNA, 20 bp, synthetic construct
  misc_feature 1..20: note = Description of Artificial Sequence: Synthetic oligonucleotide
  misc_feature 1..20: note = Target: SCN10A; (+) strand; PAM type: YTN; PAM sequence: CTT
  source 1..20: mol_type = other DNA
ctcaacctttaacataaaat

SEQ ID NO: 71728 - DNA, 20 bp, synthetic construct
  misc_feature 1..20: note = Description of Artificial Sequence: Synthetic oligonucleotide
  misc_feature 1..20: note = Target: SCN10A; (+) strand; PAM type: YTN; PAM sequence: TTC
  source 1..20: mol_type = other DNA
tcaacctttaacataaaatt

SEQ ID NO: 71729 - DNA, 20 bp, synthetic construct
  misc_feature 1..20: note = Description of Artificial Sequence: Synthetic oligonucleotide
  misc_feature 1..20: note = Target: SCN10A; (+) strand; PAM type: YTN; PAM sequence: CTC
  source 1..20: mol_type = other DNA
aacctttaacataaaatttt

SEQ ID NO: 71730 - DNA, 20 bp, synthetic construct
  misc_feature 1..20: note = Description of Artificial Sequence: Synthetic oligonucleotide
  misc_feature 1..20: note = Target: SCN10A; (+) strand; PAM type: YTN; PAM sequence: CTT
  source 1..20: mol_type = other DNA
taacataaaattttcacaat

SEQ ID NO: 71731 - DNA, 20 bp, synthetic construct
  misc_feature 1..20: note = Description of Artificial Sequence: Synthetic oligonucleotide
  misc_feature 1..20: note = Target: SCN10A; (+) strand; PAM type: YTN; PAM sequence: TTT
  source 1..20: mol_type = other DNA
aacataaaattttcacaatt

SEQ ID NO: 71732 - DNA, 20 bp, synthetic construct
  misc_feature 1..20: note = Description of Artificial Sequence: Synthetic oligonucleotide
  misc_feature 1..20: note = Target: SCN10A; (+) strand; PAM type: YTN; PAM sequence: TTA
  source 1..20: mol_type = other DNA
acataaaattttcacaattt

SEQ ID NO: 71733 - DNA, 20 bp, synthetic construct
  misc_feature 1..20: note = Description of Artificial Sequence: Synthetic oligonucleotide
  misc_feature 1..20: note = Target: SCN10A; (+) strand; PAM type: YTN; PAM sequence: TTT
  source 1..20: mol_type = other DNA
tcacaattttatactgggaa

SEQ ID NO: 71734 - DNA, 20 bp, synthetic construct
  misc_feature 1..20: note = Description of Artificial Sequence: Synthetic oligonucleotide
  misc_feature 1..20: note = Target: SCN10A; (+) strand; PAM type: YTN; PAM sequence: TTT
  source 1..20: mol_type = other DNA
cacaattttatactgggaaa

SEQ ID NO: 71735 - DNA, 20 bp, synthetic construct
  misc_feature 1..20: note = Description of Artificial Sequence: Synthetic oligonucleotide
  misc_feature 1..20: note = Target: SCN10A; (+) strand; PAM type: YTN; PAM sequence: TTC
  source 1..20: mol_type = other DNA
acaattttatactgggaaag

SEQ ID NO: 71736 - DNA, 20 bp, synthetic construct
  misc_feature 1..20: note = Description of Artificial Sequence: Synthetic oligonucleotide
  misc_feature 1..20: note = Target: SCN10A; (+) strand; PAM type: YTN; PAM sequence: TTT
  source 1..20: mol_type = other DNA
tatactgggaaagccttatt

SEQ ID NO: 71737 - DNA, 20 bp, synthetic construct
  misc_feature 1..20: note = Description of Artificial Sequence: Synthetic oligonucleotide
  misc_feature 1..20: note = Target: SCN10A; (+) strand; PAM type: YTN; PAM sequence: TTT
  source 1..20: mol_type = other DNA
atactgggaaagccttattt

SEQ ID NO: 71738 - DNA, 20 bp, synthetic construct
  misc_feature 1..20: note = Description of Artificial Sequence: Synthetic oligonucleotide
  misc_feature 1..20: note = Target: SCN10A; (+) strand; PAM type: YTN; PAM sequence: TTA
  source 1..20: mol_type = other DNA
tactgggaaagccttatttt

SEQ ID NO: 71739 - DNA, 20 bp, synthetic construct
  misc_feature 1..20: note = Description of Artificial Sequence: Synthetic oligonucleotide
  misc_feature 1..20: note = Target: SCN10A; (+) strand; PAM type: YTN; PAM sequence: CTG
  source 1..20: mol_type = other DNA
ggaaagccttattttgtgct

SEQ ID NO: 71740 - DNA, 20 bp, synthetic construct
  misc_feature 1..20: note = Description of Artificial Sequence: Synthetic oligonucleotide
  misc_feature 1..20: note = Target: SCN10A; (+) strand; PAM type: YTN; PAM sequence: CTT
  source 1..20: mol_type = other DNA
attttgtgcttgtagtagag

SEQ ID NO: 71741 - DNA, 20 bp, synthetic construct
  misc_feature 1..20: note = Description of Artificial Sequence: Synthetic oligonucleotide
  misc_feature 1..20: note = Target: SCN10A; (+) strand; PAM type: YTN; PAM sequence: TTA
  source 1..20: mol_type = other DNA
ttttgtgcttgtagtagaga

SEQ ID NO: 71742 - DNA, 20 bp, synthetic construct
  misc_feature 1..20: note = Description of Artificial Sequence: Synthetic oligonucleotide
  misc_feature 1..20: note = Target: SCN10A; (+) strand; PAM type: YTN; PAM sequence: TTT
  source 1..20: mol_type = other DNA
tgtgcttgtagtagagatat

SEQ ID NO: 71743 - DNA, 20 bp, synthetic construct
  misc_feature 1..20: note = Description of Artificial Sequence: Synthetic oligonucleotide
  misc_feature 1..20: note = Target: SCN10A; (+) strand; PAM type: YTN; PAM sequence: TTT
  source 1..20: mol_type = other DNA
gtgcttgtagtagagatatt

SEQ ID NO: 71744 - DNA, 20 bp, synthetic construct
  misc_feature 1..20: note = Description of Artificial Sequence: Synthetic oligonucleotide
  misc_feature 1..20: note = Target: SCN10A; (+) strand; PAM type: YTN; PAM sequence: TTG
  source 1..20: mol_type = other DNA
tgcttgtagtagagatattc

SEQ ID NO: 71745 - DNA, 20 bp, synthetic construct
  misc_feature 1..20: note = Description of Artificial Sequence: Synthetic oligonucleotide
  misc_feature 1..20: note = Target: SCN10A; (+) strand; PAM type: YTN; PAM sequence: CTT
  source 1..20: mol_type = other DNA
gtagtagagatattcaattg

SEQ ID NO: 71746 - DNA, 20 bp, synthetic construct
  misc_feature 1..20: note = Description of Artificial Sequence: Synthetic oligonucleotide
  misc_feature 1..20: note = Target: SCN10A; (+) strand; PAM type: YTN; PAM sequence: TTG
  source 1..20: mol_type = other DNA
tagtagagatattcaattgg

SEQ ID NO: 71747 - DNA, 20 bp, synthetic construct
  misc_feature 1..20: note = Description of Artificial Sequence: Synthetic oligonucleotide
  misc_feature 1..20: note = Target: SCN10A; (+) strand; PAM type: YTN; PAM sequence: TTC
  source 1..20: mol_type = other DNA
aattggtttaaaagtggggt

SEQ ID NO: 71748 - DNA, 20 bp, synthetic construct
  misc_feature 1..20: note = Description of Artificial Sequence: Synthetic oligonucleotide
  misc_feature 1..20: note = Target: SCN10A; (+) strand; PAM type: YTN; PAM sequence: TTG
  source 1..20: mol_type = other DNA
gtttaaaagtggggttgata

SEQ ID NO: 71749 - DNA, 20 bp, synthetic construct
  misc_feature 1..20: note = Description of Artificial Sequence: Synthetic oligonucleotide
  misc_feature 1..20: note = Target: SCN10A; (+) strand; PAM type: YTN; PAM sequence: TTT
  source 1..20: mol_type = other DNA
aaaagtggggttgataaact

SEQ ID NO: 71750 - DNA, 20 bp, synthetic construct
  misc_feature 1..20: note = Description of Artificial Sequence: Synthetic oligonucleotide
  misc_feature 1..20: note = Target: SCN10A; (+) strand; PAM type: YTN; PAM sequence: TTA
  source 1..20: mol_type = other DNA
aaagtggggttgataaactt

SEQ ID NO: 71751 - DNA, 20 bp, synthetic construct
  misc_feature 1..20: note = Description of Artificial Sequence: Synthetic oligonucleotide
  misc_feature 1..20: note = Target: SCN10A; (+) strand; PAM type: YTN; PAM sequence: TTG
  source 1..20: mol_type = other DNA
ataaactttattggaaaata

SEQ ID NO: 71752 - DNA, 20 bp, synthetic construct
  misc_feature 1..20: note = Description of Artificial Sequence: Synthetic oligonucleotide
  misc_feature 1..20: note = Target: SCN10A; (+) strand; PAM type: YTN; PAM sequence: CTT
  source 1..20: mol_type = other DNA
tattggaaaataatatggaa

SEQ ID NO: 71753 - DNA, 20 bp, synthetic construct
  misc_feature 1..20: note = Description of Artificial Sequence: Synthetic oligonucleotide
  misc_feature 1..20: note = Target: SCN10A; (+) strand; PAM type: YTN; PAM sequence: TTT
  source 1..20: mol_type = other DNA
attggaaaataatatggaag

SEQ ID NO: 71754 - DNA, 20 bp, synthetic construct
  misc_feature 1..20: note = Description of Artificial Sequence: Synthetic oligonucleotide
  misc_feature 1..20: note = Target: SCN10A; (+) strand; PAM type: YTN; PAM sequence: TTA
  source 1..20: mol_type = other DNA
ttggaaaataatatggaagt

SEQ ID NO: 71755 - DNA, 20 bp, synthetic construct
  misc_feature 1..20: note = Description of Artificial Sequence: Synthetic oligonucleotide
  misc_feature 1..20: note = Target: SCN10A; (+) strand; PAM type: YTN; PAM sequence: TTG
  source 1..20: mol_type = other DNA
gaaaataatatggaagtttt

SEQ ID NO: 71756 - DNA, 20 bp, synthetic construct
  misc_feature 1..20: note = Description of Artificial Sequence: Synthetic oligonucleotide
  misc_feature 1..20: note = Target: SCN10A; (+) strand; PAM type: YTN; PAM sequence: TTT
  source 1..20: mol_type = other DNA
tgatagctttatatcattac

SEQ ID NO: 71757 - DNA, 20 bp, synthetic construct
  misc_feature 1..20: note = Description of Artificial Sequence: Synthetic oligonucleotide
  misc_feature 1..20: note = Target: SCN10A; (+) strand; PAM type: YTN; PAM sequence: TTT
  source 1..20: mol_type = other DNA
gatagctttatatcattact

SEQ ID NO: 71758 - DNA, 20 bp, synthetic construct
  misc_feature 1..20: note = Description of Artificial Sequence: Synthetic oligonucleotide
  misc_feature 1..20: note = Target: SCN10A; (+) strand; PAM type: YTN; PAM sequence: TTG
  source 1..20: mol_type = other DNA
atagctttatatcattactt

SEQ ID NO: 71759 - DNA, 20 bp, synthetic construct
  misc_feature 1..20: note = Description of Artificial Sequence: Synthetic oligonucleotide
  misc_feature 1..20: note = Target: SCN10A; (+) strand; PAM type: YTN; PAM sequence: CTT
  source 1..20: mol_type = other DNA
tatatcattacttgacaaaa

SEQ ID NO: 71760 - DNA, 20 bp, synthetic construct
  misc_feature 1..20: note = Description of Artificial Sequence: Synthetic oligonucleotide
  misc_feature 1..20: note = Target: SCN10A; (+) strand; PAM type: YTN; PAM sequence: TTT
  source 1..20: mol_type = other DNA
atatcattacttgacaaaaa

SEQ ID NO: 71761 - DNA, 20 bp, synthetic construct
  misc_feature 1..20: note = Description of Artificial Sequence: Synthetic oligonucleotide
  misc_feature 1..20: note = Target: SCN10A; (+) strand; PAM type: YTN; PAM sequence: TTA
  source 1..20: mol_type = other DNA
tatcattacttgacaaaaac

SEQ ID NO: 71762 - DNA, 20 bp, synthetic construct
  misc_feature 1..20: note = Description of Artificial Sequence: Synthetic oligonucleotide
  misc_feature 1..20: note = Target: SCN10A; (+) strand; PAM type: YTN; PAM sequence: TTA
  source 1..20: mol_type = other DNA
cttgacaaaaacgttagcag

SEQ ID NO: 71763 - DNA, 20 bp, synthetic construct
  misc_feature 1..20: note = Description of Artificial Sequence: Synthetic oligonucleotide
  misc_feature 1..20: note = Target: SCN10A; (+) strand; PAM type: YTN; PAM sequence: CTT
  source 1..20: mol_type = other DNA
gacaaaaacgttagcagata

SEQ ID NO: 71764 - DNA, 20 bp, synthetic construct
  misc_feature 1..20: note = Description of Artificial Sequence: Synthetic oligonucleotide
  misc_feature 1..20: note = Target: SCN10A; (+) strand; PAM type: YTN; PAM sequence: TTG
  source 1..20: mol_type = other DNA
acaaaaacgttagcagataa

SEQ ID NO: 71765 - DNA, 20 bp, synthetic construct
  misc_feature 1..20: note = Description of Artificial Sequence: Synthetic oligonucleotide
  misc_feature 1..20: note = Target: SCN10A; (+) strand; PAM type: YTN; PAM sequence: TTA
  source 1..20: mol_type = other DNA
gcagataataaattgggtac

SEQ ID NO: 71766 - DNA, 20 bp, synthetic construct
  misc_feature 1..20: note = Description of Artificial Sequence: Synthetic oligonucleotide
  misc_feature 1..20: note = Target: SCN10A; (+) strand; PAM type: YTN; PAM sequence: TTG
  source 1..20: mol_type = other DNA
ggtactaggacaaaaggatc

SEQ ID NO: 71767 - DNA, 20 bp, synthetic construct
  misc_feature 1..20: note = Description of Artificial Sequence: Synthetic oligonucleotide
  misc_feature 1..20: note = Target: SCN10A; (+) strand; PAM type: YTN; PAM sequence: CTA
  source 1..20: mol_type = other DNA
ggacaaaaggatcattggtc

SEQ ID NO: 71768 - DNA, 20 bp, synthetic construct
  misc_feature 1..20: note = Description of Artificial Sequence: Synthetic oligonucleotide
  misc_feature 1..20: note = Target: SCN10A; (+) strand; PAM type: YTN; PAM sequence: TTG
  source 1..20: mol_type = other DNA
gtccaataaaattcaattat

SEQ ID NO: 71769 - DNA, 20 bp, synthetic construct
  misc_feature 1..20: note = Description of Artificial Sequence: Synthetic oligonucleotide
  misc_feature 1..20: note = Target: SCN10A; (+) strand; PAM type: YTN; PAM sequence: TTC
  source 1..20: mol_type = other DNA
aattatcattattcattgtc

SEQ ID NO: 71770 - DNA, 20 bp, synthetic construct
  misc_feature 1..20: note = Description of Artificial Sequence: Synthetic oligonucleotide
  misc_feature 1..20: note = Target: SCN10A; (+) strand; PAM type: YTN; PAM sequence: TTA
  source 1..20: mol_type = other DNA
tcattattcattgtcatggc

SEQ ID NO: 71771 - DNA, 20 bp, synthetic construct
  misc_feature 1..20: note = Description of Artificial Sequence: Synthetic oligonucleotide
  misc_feature 1..20: note = Target: SCN10A; (+) strand; PAM type: YTN; PAM sequence: TTA
  source 1..20: mol_type = other DNA
ttcattgtcatggctcccat

SEQ ID NO: 71772 - DNA, 20 bp, synthetic construct
  misc_feature 1..20: note = Description of Artificial Sequence: Synthetic oligonucleotide
  misc_feature 1..20: note = Target: SCN10A; (+) strand; PAM type: YTN; PAM sequence: TTC
  source 1..20: mol_type = other DNA
attgtcatggctcccatttt

SEQ ID NO: 71773 - DNA, 20 bp, synthetic construct
  misc_feature 1..20: note = Description of Artificial Sequence: Synthetic oligonucleotide
  misc_feature 1..20: note = Target: SCN10A; (+) strand; PAM type: YTN; PAM sequence: TTG
  source 1..20: mol_type = other DNA
tcatggctcccattttctta

SEQ ID NO: 71774 - DNA, 20 bp, synthetic construct
  misc_feature 1..20: note = Description of Artificial Sequence: Synthetic oligonucleotide
  misc_feature 1..20: note = Target: SCN10A; (+) strand; PAM type: YTN; PAM sequence: CTC
  source 1..20: mol_type = other DNA
ccattttcttatatattttt

SEQ ID NO: 71775 - DNA, 20 bp, synthetic construct
  misc_feature 1..20: note = Description of Artificial Sequence: Synthetic oligonucleotide
  misc_feature 1..20: note = Target: SCN10A; (+) strand; PAM type: YTN; PAM sequence: TTT
  source 1..20: mol_type = other DNA
tcttatatatttttgtctgg

SEQ ID NO: 71776 - DNA, 20 bp, synthetic construct
  misc_feature 1..20: note = Description of Artificial Sequence: Synthetic oligonucleotide
  misc_feature 1..20: note = Target: SCN10A; (+) strand; PAM type: YTN; PAM sequence: TTT
  source 1..20: mol_type = other DNA
cttatatatttttgtctggt

SEQ ID NO: 71777 - DNA, 20 bp, synthetic construct
  misc_feature 1..20: note = Description of Artificial Sequence: Synthetic oligonucleotide
  misc_feature 1..20: note = Target: SCN10A; (+) strand; PAM type: YTN; PAM sequence: TTC
  source 1..20: mol_type = other DNA
ttatatatttttgtctggtt

SEQ ID NO: 71778 - DNA, 20 bp, synthetic construct
  misc_feature 1..20: note = Description of Artificial Sequence: Synthetic oligonucleotide
  misc_feature 1..20: note = Target: SCN10A; (+) strand; PAM type: YTN; PAM sequence: CTT
  source 1..20: mol_type = other DNA
atatatttttgtctggtttt

SEQ ID NO: 71779 - DNA, 20 bp, synthetic construct
  misc_feature 1..20: note = Description of Artificial Sequence: Synthetic oligonucleotide
  misc_feature 1..20: note = Target: SCN10A; (+) strand; PAM type: YTN; PAM sequence: TTA
  source 1..20: mol_type = other DNA
tatatttttgtctggttttg

SEQ ID NO: 71780 - DNA, 20 bp, synthetic construct
  misc_feature 1..20: note = Description of Artificial Sequence: Synthetic oligonucleotide
  misc_feature 1..20: note = Target: SCN10A; (+) strand; PAM type: YTN; PAM sequence: TTT
  source 1..20: mol_type = other DNA
ttgtctggttttgggagatt

SEQ ID NO: 71781 - DNA, 20 bp, synthetic construct
  misc_feature 1..20: note = Description of Artificial Sequence: Synthetic oligonucleotide
  misc_feature 1..20: note = Target: SCN10A; (+) strand; PAM type: YTN; PAM sequence: TTT
  source 1..20: mol_type = other DNA
tgtctggttttgggagatta

SEQ ID NO: 71782 - DNA, 20 bp, synthetic construct
  misc_feature 1..20: note = Description of Artificial Sequence: Synthetic oligonucleotide
  misc_feature 1..20: note = Target: SCN10A; (+) strand; PAM type: YTN; PAM sequence: TTT
  source 1..20: mol_type = other DNA
gtctggttttgggagattat

SEQ ID NO: 71783 - DNA, 20 bp, synthetic construct
  misc_feature 1..20: note = Description of Artificial Sequence: Synthetic oligonucleotide
  misc_feature 1..20: note = Target: SCN10A; (+) strand; PAM type: YTN; PAM sequence: TTG
  source 1..20: mol_type = other DNA
tctggttttgggagattatc

SEQ ID NO: 71784 - DNA, 20 bp, synthetic construct
  misc_feature 1..20: note = Description of Artificial Sequence: Synthetic oligonucleotide
  misc_feature 1..20: note = Target: SCN10A; (+) strand; PAM type: YTN; PAM sequence: CTG
  source 1..20: mol_type = other DNA
gttttgggagattatccaca

SEQ ID NO: 71785 - DNA, 20 bp, synthetic construct
  misc_feature 1..20: note = Description of Artificial Sequence: Synthetic oligonucleotide
  misc_feature 1..20: note = Target: SCN10A; (+) strand; PAM type: YTN; PAM sequence: TTT
  source 1..20: mol_type = other DNA
tgggagattatccacatcca

SEQ ID NO: 71786 - DNA, 20 bp, synthetic construct
  misc_feature 1..20: note = Description of Artificial Sequence: Synthetic oligonucleotide
  misc_feature 1..20: note = Target: SCN10A; (+) strand; PAM type: YTN; PAM sequence: TTT
  source 1..20: mol_type = other DNA
gggagattatccacatccat

SEQ ID NO: 71787 - DNA, 20 bp, synthetic construct
  misc_feature 1..20: note = Description of Artificial Sequence: Synthetic oligonucleotide
  misc_feature 1..20: note = Target: SCN10A; (+) strand; PAM type: YTN; PAM sequence: TTG
  source 1..20: mol_type = other DNA
ggagattatccacatccatt

SEQ ID NO: 71788 - DNA, 20 bp, synthetic construct
  misc_feature 1..20: note = Description of Artificial Sequence: Synthetic oligonucleotide
  misc_feature 1..20: note = Target: SCN10A; (+) strand; PAM type: YTN; PAM sequence: TTA
  source 1..20: mol_type = other DNA
tccacatccattatccactt

SEQ ID NO: 71789 - DNA, 20 bp, synthetic construct
  misc_feature 1..20: note = Description of Artificial Sequence: Synthetic oligonucleotide
  misc_feature 1..20: note = Target: SCN10A; (+) strand; PAM type: YTN; PAM sequence: TTA
  source 1..20: mol_type = other DNA
tccacttgtctcatgacaaa

SEQ ID NO: 71790 - DNA, 20 bp, synthetic construct
  misc_feature 1..20: note = Description of Artificial Sequence: Synthetic oligonucleotide
  misc_feature 1..20: note = Target: SCN10A; (+) strand; PAM type: YTN; PAM sequence: CTT
  source 1..20: mol_type = other DNA
gtctcatgacaaacagattc

SEQ ID NO: 71791 - DNA, 20 bp, synthetic construct
  misc_feature 1..20: note = Description of Artificial Sequence: Synthetic oligonucleotide
  misc_feature 1..20: note = Target: SCN10A; (+) strand; PAM type: YTN; PAM sequence: TTG
  source 1..20: mol_type = other DNA
tctcatgacaaacagattca

SEQ ID NO: 71792 - DNA, 20 bp, synthetic construct
  misc_feature 1..20: note = Description of Artificial Sequence: Synthetic oligonucleotide
  misc_feature 1..20: note = Target: SCN10A; (+) strand; PAM type: YTN; PAM sequence: CTC
  source 1..20: mol_type = other DNA
atgacaaacagattcatgct

SEQ ID NO: 71793 - DNA, 20 bp, synthetic construct
  misc_feature 1..20: note = Description of Artificial Sequence: Synthetic oligonucleotide
  misc_feature 1..20: note = Target: SCN10A; (+) strand; PAM type: YTN; PAM sequence: TTC
  source 1..20: mol_type = other DNA
atgctttgtatttttacaat

SEQ ID NO: 71794 - DNA, 20 bp, synthetic construct
  misc_feature 1..20: note = Description of Artificial Sequence: Synthetic oligonucleotide
  misc_feature 1..20: note = Target: SCN10A; (+) strand; PAM type: YTN; PAM sequence: CTT
  source 1..20: mol_type = other DNA
tgtatttttacaatggaggc

SEQ ID NO: 71795 - DNA, 20 bp, synthetic construct
  misc_feature 1..20: note = Description of Artificial Sequence: Synthetic oligonucleotide
  misc_feature 1..20: note = Target: SCN10A; (+) strand; PAM type: YTN; PAM sequence: TTT
  source 1..20: mol_type = other DNA
gtatttttacaatggaggcc

SEQ ID NO: 71796 - DNA, 20 bp, synthetic construct
  misc_feature 1..20: note = Description of Artificial Sequence: Synthetic oligonucleotide
  misc_feature 1..20: note = Target: SCN10A; (+) strand; PAM type: YTN; PAM sequence: TTG
  source 1..20: mol_type = other DNA
tatttttacaatggaggcca

SEQ ID NO: 71797 - DNA, 20 bp, synthetic construct
  misc_feature 1..20: note = Description of Artificial Sequence: Synthetic oligonucleotide
  misc_feature 1..20: note = Target: SCN10A; (+) strand; PAM type: YTN; PAM sequence: TTT
  source 1..20: mol_type = other DNA
ttacaatggaggccattcat

SEQ ID NO: 71798 - DNA, 20 bp, synthetic construct
  misc_feature 1..20: note = Description of Artificial Sequence: Synthetic oligonucleotide
  misc_feature 1..20: note = Target: SCN10A; (+) strand; PAM type: YTN; PAM sequence: TTT
  source 1..20: mol_type = other DNA
tacaatggaggccattcatt

SEQ ID NO: 71799 - DNA, 20 bp, synthetic construct
  misc_feature 1..20: note = Description of Artificial Sequence: Synthetic oligonucleotide
  misc_feature 1..20: note = Target: SCN10A; (+) strand; PAM type: YTN; PAM sequence: TTT
  source 1..20: mol_type = other DNA
acaatggaggccattcatta

SEQ ID NO: 71800 - DNA, 20 bp, synthetic construct
  misc_feature 1..20: note = Description of Artificial Sequence: Synthetic oligonucleotide
  misc_feature 1..20: note = Target: SCN10A; (+) strand; PAM type: YTN; PAM sequence: TTA
  source 1..20: mol_type = other DNA
caatggaggccattcattac

SEQ ID NO: 71801 - DNA, 20 bp, synthetic construct
  misc_feature 1..20: note = Description of Artificial Sequence: Synthetic oligonucleotide
  misc_feature 1..20: note = Target: SCN10A; (+) strand; PAM type: YTN; PAM sequence: TTC
  source 1..20: mol_type = other DNA
attacttacattgtgacctt

SEQ ID NO: 71802 - DNA, 20 bp, synthetic construct
  misc_feature 1..20: note = Description of Artificial Sequence: Synthetic oligonucleotide
  misc_feature 1..20: note = Target: SCN10A; (+) strand; PAM type: YTN; PAM sequence: TTA
  source 1..20: mol_type = other DNA
cttacattgtgaccttattt

SEQ ID NO: 71803 - DNA, 20 bp, synthetic construct
  misc_feature 1..20: note = Description of Artificial Sequence: Synthetic oligonucleotide
  misc_feature 1..20: note = Target: SCN10A; (+) strand; PAM type: YTN; PAM sequence: CTT
  source 1..20: mol_type = other DNA
acattgtgaccttatttcac

SEQ ID NO: 71804 - DNA, 20 bp, synthetic construct
  misc_feature 1..20: note = Description of Artificial Sequence: Synthetic oligonucleotide
  misc_feature 1..20: note = Target: SCN10A; (+) strand; PAM type: YTN; PAM sequence: TTA
  source 1..20: mol_type = other DNA
cattgtgaccttatttcaca

SEQ ID NO: 71805 - DNA, 20 bp, synthetic construct
  misc_feature 1..20: note = Description of Artificial Sequence: Synthetic oligonucleotide
  misc_feature 1..20: note = Target: SCN10A; (+) strand; PAM type: YTN; PAM sequence: TTG
  source 1..20: mol_type = other DNA
tgaccttatttcacattgta

SEQ ID NO: 71806 - DNA, 20 bp, synthetic construct
  misc_feature 1..20: note = Description of Artificial Sequence: Synthetic oligonucleotide
  misc_feature 1..20: note = Target: SCN10A; (+) strand; PAM type: YTN; PAM sequence: CTT
  source 1..20: mol_type = other DNA
atttcacattgtaggattta

SEQ ID NO: 71807 - DNA, 20 bp, synthetic construct
  misc_feature 1..20: note = Description of Artificial Sequence: Synthetic oligonucleotide
  misc_feature 1..20: note = Target: SCN10A; (+) strand; PAM type: YTN; PAM sequence: TTA
  source 1..20: mol_type = other DNA
tttcacattgtaggatttat

SEQ ID NO: 71808 - DNA, 20 bp, synthetic construct
  misc_feature 1..20: note = Description of Artificial Sequence: Synthetic oligonucleotide
  misc_feature 1..20: note = Target: SCN10A; (+) strand; PAM type: YTN; PAM sequence: TTT
  source 1..20: mol_type = other DNA
cacattgtaggatttatatt

SEQ ID NO: 71809 - DNA, 20 bp, synthetic construct
  misc_feature 1..20: note = Description of Artificial Sequence: Synthetic oligonucleotide
  misc_feature 1..20: note = Target: SCN10A; (+) strand; PAM type: YTN; PAM sequence: TTC
  source 1..20: mol_type = other DNA
acattgtaggatttatattt

SEQ ID NO: 71810 - DNA, 20 bp, synthetic construct
  misc_feature 1..20: note = Description of Artificial Sequence: Synthetic oligonucleotide
  misc_feature 1..20: note = Target: SCN10A; (+) strand; PAM type: YTN; PAM sequence: TTG
  source 1..20: mol_type = other DNA
taggatttatatttctattt

SEQ ID NO: 71811 - DNA, 20 bp, synthetic construct
  misc_feature 1..20: note = Description of Artificial Sequence: Synthetic oligonucleotide
  misc_feature 1..20: note = Target: SCN10A; (+) strand; PAM type: YTN; PAM sequence: TTT
  source 1..20: mol_type = other DNA
atatttctatttttatcatt

SEQ ID NO: 71812 - DNA, 20 bp, synthetic construct
  misc_feature 1..20: note = Description of Artificial Sequence: Synthetic oligonucleotide
  misc_feature 1..20: note = Target: SCN10A; (+) strand; PAM type: YTN; PAM sequence: TTA
  source 1..20: mol_type = other DNA
tatttctatttttatcatta

SEQ ID NO: 71813 - DNA, 20 bp, synthetic construct
  misc_feature 1..20: note = Description of Artificial Sequence: Synthetic oligonucleotide
  misc_feature 1..20: note = Target: SCN10A; (+) strand; PAM type: YTN; PAM sequence: TTT
  source 1..20: mol_type = other DNA
ctatttttatcattattgtt

SEQ ID NO: 71814 - DNA, 20 bp, synthetic construct
  misc_feature 1..20: note = Description of Artificial Sequence: Synthetic oligonucleotide
  misc_feature 1..20: note = Target: SCN10A; (+) strand; PAM type: YTN; PAM sequence: TTC
  source 1..20: mol_type = other DNA
tatttttatcattattgtta

SEQ ID NO: 71815 - DNA, 20 bp, synthetic construct
  misc_feature 1..20: note = Description of Artificial Sequence: Synthetic oligonucleotide
  misc_feature 1..20: note = Target: SCN10A; (+) strand; PAM type: YTN; PAM sequence: CTA
  source 1..20: mol_type = other DNA
tttttatcattattgttatg

SEQ ID NO: 71816 - DNA, 20 bp, synthetic construct
  misc_feature 1..20: note = Description of Artificial Sequence: Synthetic oligonucleotide
  misc_feature 1..20: note = Target: SCN10A; (+) strand; PAM type: YTN; PAM sequence: TTT
  source 1..20: mol_type = other DNA
ttatcattattgttatgctt

SEQ ID NO: 71817 - DNA, 20 bp, synthetic construct
  misc_feature 1..20: note = Description of Artificial Sequence: Synthetic oligonucleotide
  misc_feature 1..20: note = Target: SCN10A; (+) strand; PAM type: YTN; PAM sequence: TTT
  source 1..20: mol_type = other DNA
tatcattattgttatgcttc

SEQ ID NO: 71818 - DNA, 20 bp, synthetic construct
  misc_feature 1..20: note = Description of Artificial Sequence: Synthetic oligonucleotide
  misc_feature 1..20: note = Target: SCN10A; (+) strand; PAM type: YTN; PAM sequence: TTT
  source 1..20: mol_type = other DNA
atcattattgttatgcttca

SEQ ID NO: 71819 - DNA, 20 bp, synthetic construct
  misc_feature 1..20: note = Description of Artificial Sequence: Synthetic oligonucleotide
  misc_feature 1..20: note = Target: SCN10A; (+) strand; PAM type: YTN; PAM sequence: TTA
  source 1..20: mol_type = other DNA
tcattattgttatgcttcag

SEQ ID NO: 71820 - DNA, 20 bp, synthetic construct
  misc_feature 1..20: note = Description of Artificial Sequence: Synthetic oligonucleotide
  misc_feature 1..20: note = Target: SCN10A; (+) strand; PAM type: YTN; PAM sequence: TTA
  source 1..20: mol_type = other DNA
ttgttatgcttcagaaaacc

SEQ ID NO: 71821 - DNA, 20 bp, synthetic construct
  misc_feature 1..20: note = Description of Artificial Sequence: Synthetic oligonucleotide
  misc_feature 1..20: note = Target: SCN10A; (+) strand; PAM type: YTN; PAM sequence: TTG
  source 1..20: mol_type = other DNA
ttatgcttcagaaaaccact

SEQ ID NO: 71822 - DNA, 20 bp, synthetic construct
  misc_feature 1..20: note = Description of Artificial Sequence: Synthetic oligonucleotide
  misc_feature 1..20: note = Target: SCN10A; (+) strand; PAM type: YTN; PAM sequence: TTA
  source 1..20: mol_type = other DNA
tgcttcagaaaaccactttc

SEQ ID NO: 71823 - DNA, 20 bp, synthetic construct
  misc_feature 1..20: note = Description of Artificial Sequence: Synthetic oligonucleotide
  misc_feature 1..20: note = Target: SCN10A; (+) strand; PAM type: YTN; PAM sequence: CTT
  source 1..20: mol_type = other DNA
cagaaaaccactttcgaagt

SEQ ID NO: 71824 - DNA, 20 bp, synthetic construct
  misc_feature 1..20: note = Description of Artificial Sequence: Synthetic oligonucleotide
  misc_feature 1..20: note = Target: SCN10A; (+) strand; PAM type: YTN; PAM sequence: TTC
  source 1..20: mol_type = other DNA
agaaaaccactttcgaagtg

SEQ ID NO: 71825 - DNA, 20 bp, synthetic construct
  misc_feature 1..20: note = Description of Artificial Sequence: Synthetic oligonucleotide
  misc_feature 1..20: note = Target: SCN10A; (+) strand; PAM type: YTN; PAM sequence: CTT
  source 1..20: mol_type = other DNA
tcgaagtgatgactcttttt

SEQ ID NO: 71826 - DNA, 20 bp, synthetic construct
  misc_feature 1..20: note = Description of Artificial Sequence: Synthetic oligonucleotide
  misc_feature 1..20: note = Target: SCN10A; (+) strand; PAM type: YTN; PAM sequence: TTT
  source 1..20: mol_type = other DNA
cgaagtgatgactctttttt

SEQ ID NO: 71827 - DNA, 20 bp, synthetic construct
  misc_feature 1..20: note = Description of Artificial Sequence: Synthetic oligonucleotide
  misc_feature 1..20: note = Target: SCN10A; (+) strand; PAM type: YTN; PAM sequence: TTC
  source 1..20: mol_type = other DNA
gaagtgatgactcttttttt

SEQ ID NO: 71828 - DNA, 20 bp, synthetic construct
  misc_feature 1..20: note = Description of Artificial Sequence: Synthetic oligonucleotide
  misc_feature 1..20: note = Target: SCN10A; (+) strand; PAM type: YTN; PAM sequence: CTC
  source 1..20: mol_type = other DNA
ttttttttgaattgtgatat

SEQ ID NO: 71829 - DNA, 20 bp, synthetic construct
  misc_feature 1..20: note = Description of Artificial Sequence: Synthetic oligonucleotide
  misc_feature 1..20: note = Target: SCN10A; (+) strand; PAM type: YTN; PAM sequence: CTT
  source 1..20: mol_type = other DNA
ttttttgaattgtgatatta

SEQ ID NO: 71830 - DNA, 20 bp, synthetic construct
  misc_feature 1..20: note = Description of Artificial Sequence: Synthetic oligonucleotide
  misc_feature 1..20: note = Target: SCN10A; (+) strand; PAM type: YTN; PAM sequence: TTT
  source 1..20: mol_type = other DNA
tttttgaattgtgatattat

SEQ ID NO: 71831 - DNA, 20 bp, synthetic construct
  misc_feature 1..20: note = Description of Artificial Sequence: Synthetic oligonucleotide
  misc_feature 1..20: note = Target: SCN10A; (+) strand; PAM type: YTN; PAM sequence: TTT
  source 1..20: mol_type = other DNA
ttttgaattgtgatattatg

SEQ ID NO: 71832 - DNA, 20 bp, synthetic construct
  misc_feature 1..20: note = Description of Artificial Sequence: Synthetic oligonucleotide
  misc_feature 1..20: note = Target: SCN10A; (+) strand; PAM type: YTN; PAM sequence: TTT
  source 1..20: mol_type = other DNA
tttgaattgtgatattatgc

SEQ ID NO: 71833 - DNA, 20 bp, synthetic construct
  misc_feature 1..20: note = Description of Artificial Sequence: Synthetic oligonucleotide
  misc_feature 1..20: note = Target: SCN10A; (+) strand; PAM type: YTN; PAM sequence: TTT
  source 1..20: mol_type = other DNA
ttgaattgtgatattatgca

SEQ ID NO: 71834 - DNA, 20 bp, synthetic construct
  misc_feature 1..20: note = Description of Artificial Sequence: Synthetic oligonucleotide
  misc_feature 1..20: note = Target: SCN10A; (+) strand; PAM type: YTN; PAM sequence: TTT
  source 1..20: mol_type = other DNA
tgaattgtgatattatgcaa

SEQ ID NO: 71835 - DNA, 20 bp, synthetic construct
  misc_feature 1..20: note = Description of Artificial Sequence: Synthetic oligonucleotide
  misc_feature 1..20: note = Target: SCN10A; (+) strand; PAM type: YTN; PAM sequence: TTT
  source 1..20: mol_type = other DNA
gaattgtgatattatgcaaa

SEQ ID NO: 71836 - DNA, 20 bp, synthetic construct
  misc_feature 1..20: note = Description of Artificial Sequence: Synthetic oligonucleotide
  misc_feature 1..20: note = Target: SCN10A; (+) strand; PAM type: YTN; PAM sequence: TTG
  source 1..20: mol_type = other DNA
aattgtgatattatgcaaag

SEQ ID NO: 71837 - DNA, 20 bp, synthetic construct
  misc_feature 1..20: note = Description of Artificial Sequence: Synthetic oligonucleotide
  misc_feature 1..20: note = Target: SCN10A; (+) strand; PAM type: YTN; PAM sequence: TTG
  source 1..20: mol_type = other DNA
tgatattatgcaaagcgaca

SEQ ID NO: 71838 - DNA, 20 bp, synthetic construct
  misc_feature 1..20: note = Description of Artificial Sequence: Synthetic oligonucleotide
  misc_feature 1..20: note = Target: SCN10A; (+) strand; PAM type: YTN; PAM sequence: TTA
  source 1..20: mol_type = other DNA
tgcaaagcgacagtaataat

SEQ ID NO: 71839 - DNA, 20 bp, synthetic construct
  misc_feature 1..20: note = Description of Artificial Sequence: Synthetic oligonucleotide
  misc_feature 1..20: note = Target: SCN10A; (+) strand; PAM type: YTN; PAM sequence: CTG
  source 1..20: mol_type = other DNA
acaagtgtaaataactgtca

SEQ ID NO: 71840 - DNA, 20 bp, synthetic construct
  misc_feature 1..20: note = Description of Artificial Sequence: Synthetic oligonucleotide
  misc_feature 1..20: note = Target: SCN10A; (+) strand; PAM type: YTN; PAM sequence: CTG
  source 1..20: mol_type = other DNA
tcaggtgacaataaaataca

SEQ ID NO: 71841 - DNA, 20 bp, synthetic construct
  misc_feature 1..20: note = Description of Artificial Sequence: Synthetic oligonucleotide
  misc_feature 1..20: note = Target: SCN10A; (+) strand; PAM type: YTN; PAM sequence: TTA
  source 1..20: mol_type = other DNA
gtcaagataaactgcctatg

SEQ ID NO: 71842 - DNA, 20 bp, synthetic construct
  misc_feature 1..20: note = Description of Artificial Sequence: Synthetic oligonucleotide
  misc_feature 1..20: note = Target: SCN10A; (+) strand; PAM type: YTN; PAM sequence: CTG
  source 1..20: mol_type = other DNA
cctatgattaactccatgtt

SEQ ID NO: 71843 - DNA, 20 bp, synthetic construct
  misc_feature 1..20: note = Description of Artificial Sequence: Synthetic oligonucleotide
  misc_feature 1..20: note = Target: SCN10A; (+) strand; PAM type: YTN; PAM sequence: CTA
  source 1..20: mol_type = other DNA
tgattaactccatgttaacc

SEQ ID NO: 71844 - DNA, 20 bp, synthetic construct
  misc_feature 1..20: note = Description of Artificial Sequence: Synthetic oligonucleotide
  misc_feature 1..20: note = Target: SCN10A; (+) strand; PAM type: YTN; PAM sequence: TTA
  source 1..20: mol_type = other DNA
actccatgttaaccattatg

SEQ ID NO: 71845 - DNA, 20 bp, synthetic construct
  misc_feature 1..20: note = Description of Artificial Sequence: Synthetic oligonucleotide
  misc_feature 1..20: note = Target: SCN10A; (+) strand; PAM type: YTN; PAM sequence: CTC
  source 1..20: mol_type = other DNA
catgttaaccattatgaatg

SEQ ID NO: 71846 - DNA, 20 bp, synthetic construct
  misc_feature 1..20: note = Description of Artificial Sequence: Synthetic oligonucleotide
  misc_feature 1..20: note = Target: SCN10A; (+) strand; PAM type: YTN; PAM sequence: TTA
  source 1..20: mol_type = other DNA
accattatgaatgaaatcag

SEQ ID NO: 71847 - DNA, 20 bp, synthetic construct
  misc_feature 1..20: note = Description of Artificial Sequence: Synthetic oligonucleotide
  misc_feature 1..20: note = Target: SCN10A; (+) strand; PAM type: YTN; PAM sequence: TTA
  source 1..20: mol_type = other DNA
tgaatgaaatcagtttttga

SEQ ID NO: 71848 - DNA, 20 bp, synthetic construct
  misc_feature 1..20: note = Description of Artificial Sequence: Synthetic oligonucleotide
  misc_feature 1..20: note = Target: SCN10A; (+) strand; PAM type: YTN; PAM sequence: TTT
  source 1..20: mol_type = other DNA
ttgaagcacatacactgttt

SEQ ID NO: 71849 - DNA, 20 bp, synthetic construct
  misc_feature 1..20: note = Description of Artificial Sequence: Synthetic oligonucleotide
  misc_feature 1..20: note = Target: SCN10A; (+) strand; PAM type: YTN; PAM sequence: TTT
  source 1..20: mol_type = other DNA
tgaagcacatacactgtttt

SEQ ID NO: 71850 - DNA, 20 bp, synthetic construct
  misc_feature 1..20: note = Description of Artificial Sequence: Synthetic oligonucleotide
  misc_feature 1..20: note = Target: SCN10A; (+) strand; PAM type: YTN; PAM sequence: TTT
  source 1..20: mol_type = other DNA
gaagcacatacactgttttt

SEQ ID NO: 71851 - DNA, 20 bp, synthetic construct
  misc_feature 1..20: note = Description of Artificial Sequence: Synthetic oligonucleotide
  misc_feature 1..20: note = Target: SCN10A; (+) strand; PAM type: YTN; PAM sequence: TTG
  source 1..20: mol_type = other DNA
aagcacatacactgtttttg

SEQ ID NO: 71852 - DNA, 20 bp, synthetic construct
  misc_feature 1..20: note = Description of Artificial Sequence: Synthetic oligonucleotide
  misc_feature 1..20: note = Target: SCN10A; (+) strand; PAM type: YTN; PAM sequence: CTG
  source 1..20: mol_type = other DNA
tttttgaaaacataaaaagt

SEQ ID NO: 71853 - DNA, 20 bp, synthetic construct
  misc_feature 1..20: note = Description of Artificial Sequence: Synthetic oligonucleotide
  misc_feature 1..20: note = Target: SCN10A; (+) strand; PAM type: YTN; PAM sequence: TTT
  source 1..20: mol_type = other DNA
ttgaaaacataaaaagttag

SEQ ID NO: 71854 - DNA, 20 bp, synthetic construct
  misc_feature 1..20: note = Description of Artificial Sequence: Synthetic oligonucleotide
  misc_feature 1..20: note = Target: SCN10A; (+) strand; PAM type: YTN; PAM sequence: TTT
  source 1..20: mol_type = other DNA
tgaaaacataaaaagttaga

SEQ ID NO: 71855 - DNA, 20 bp, synthetic construct
  misc_feature 1..20: note = Description of Artificial Sequence: Synthetic oligonucleotide
  misc_feature 1..20: note = Target: SCN10A; (+) strand; PAM type: YTN; PAM sequence: TTT
  source 1..20: mol_type = other DNA
gaaaacataaaaagttagaa

SEQ ID NO: 71856 - DNA, 20 bp, synthetic construct
  misc_feature 1..20: note = Description of Artificial Sequence: Synthetic oligonucleotide
  misc_feature 1..20: note = Target: SCN10A; (+) strand; PAM type: YTN; PAM sequence: TTG
  source 1..20: mol_type = other DNA
aaaacataaaaagttagaaa

SEQ ID NO: 71857 - DNA, 20 bp, synthetic construct
  misc_feature 1..20: note = Description of Artificial Sequence: Synthetic oligonucleotide
  misc_feature 1..20: note = Target: SCN10A; (+) strand; PAM type: YTN; PAM sequence: TTA
  source 1..20: mol_type = other DNA
gaaattctatgaatataata

SEQ ID NO: 71858 - DNA, 20 bp, synthetic construct
  misc_feature 1..20: note = Description of Artificial Sequence: Synthetic oligonucleotide
  misc_feature 1..20: note = Target: SCN10A; (+) strand; PAM type: YTN; PAM sequence: TTC
  source 1..20: mol_type = other DNA
tatgaatataataattaatc

SEQ ID NO: 71859 - DNA, 20 bp, synthetic construct
  misc_feature 1..20: note = Description of Artificial Sequence: Synthetic oligonucleotide
  misc_feature 1..20: note = Target: SCN10A; (+) strand; PAM type: YTN; PAM sequence: CTA
  source 1..20: mol_type = other DNA
tgaatataataattaatctt

SEQ ID NO: 71860 - DNA, 20 bp, synthetic construct
  misc_feature 1..20: note = Description of Artificial Sequence: Synthetic oligonucleotide
  misc_feature 1..20: note = Target: SCN10A; (+) strand; PAM type: YTN; PAM sequence: TTA
  source 1..20: mol_type = other DNA
atcttacatgttagatttta

SEQ ID NO: 71861 - DNA, 20 bp, synthetic construct
  misc_feature 1..20: note = Description of Artificial Sequence: Synthetic oligonucleotide
  misc_feature 1..20: note = Target: SCN10A; (+) strand; PAM type: YTN; PAM sequence: CTT
  source 1..20: mol_type = other DNA
acatgttagattttaaaatt

SEQ ID NO: 71862 - DNA, 20 bp, synthetic construct
  misc_feature 1..20: note = Description of Artificial Sequence: Synthetic oligonucleotide
  misc_feature 1..20: note = Target: SCN10A; (+) strand; PAM type: YTN; PAM sequence: TTA
  source 1..20: mol_type = other DNA
catgttagattttaaaatta

SEQ ID NO: 71863 - DNA, 20 bp, synthetic construct
  misc_feature 1..20: note = Description of Artificial Sequence: Synthetic oligonucleotide
  misc_feature 1..20: note = Target: SCN10A; (+) strand; PAM type: YTN; PAM sequence: TTA
  source 1..20: mol_type = other DNA
gattttaaaattatatgtgc

SEQ ID NO: 71864 - DNA, 20 bp, synthetic construct
  misc_feature 1..20: note = Description of Artificial Sequence: Synthetic oligonucleotide
  misc_feature 1..20: note = Target: SCN10A; (+) strand; PAM type: YTN; PAM sequence: TTT
  source 1..20: mol_type = other DNA
taaaattatatgtgcataga

SEQ ID NO: 71865 - DNA, 20 bp, synthetic construct
  misc_feature 1..20: note = Description of Artificial Sequence: Synthetic oligonucleotide
  misc_feature 1..20: note = Target: SCN10A; (+) strand; PAM type: YTN; PAM sequence: TTT
  source 1..20: mol_type = other DNA
aaaattatatgtgcatagag

SEQ ID NO: 71866 - DNA, 20 bp, synthetic construct
  misc_feature 1..20: note = Description of Artificial Sequence: Synthetic oligonucleotide
  misc_feature 1..20: note = Target: SCN10A; (+) strand; PAM type: YTN; PAM sequence: TTA
  source 1..20: mol_type = other DNA
aaattatatgtgcatagaga

SEQ ID NO: 71867 - DNA, 20 bp, synthetic construct
  misc_feature 1..20: note = Description of Artificial Sequence: Synthetic oligonucleotide
  misc_feature 1..20: note = Target: SCN10A; (+) strand; PAM type: YTN; PAM sequence: TTA
  source 1..20: mol_type = other DNA
tatgtgcatagagatcctta

SEQ ID NO: 71868 - DNA, 20 bp, synthetic construct
  misc_feature 1..20: note = Description of Artificial Sequence: Synthetic oligonucleotide
  misc_feature 1..20: note = Target: SCN10A; (+) strand; PAM type: YTN; PAM sequence: CTT
  source 1..20: mol_type = other DNA
agatcacttgttgagaaaca

SEQ ID NO: 71869 - DNA, 20 bp, synthetic construct
  misc_feature 1..20: note = Description of Artificial Sequence: Synthetic oligonucleotide
  misc_feature 1..20: note = Target: SCN10A; (+) strand; PAM type: YTN; PAM sequence: TTA
  source 1..20: mol_type = other DNA
gatcacttgttgagaaacat

SEQ ID NO: 71870 - DNA, 20 bp, synthetic construct
  misc_feature 1..20: note = Description of Artificial Sequence: Synthetic oligonucleotide
  misc_feature 1..20: note = Target: SCN10A; (+) strand; PAM type: YTN; PAM sequence: CTT
  source 1..20: mol_type = other DNA
gttgagaaacattgtaggag

SEQ ID NO: 71871 - DNA, 20 bp, synthetic construct
  misc_feature 1..20: note = Description of Artificial Sequence: Synthetic oligonucleotide
  misc_feature 1..20: note = Target: SCN10A; (+) strand; PAM type: YTN; PAM sequence: TTG
  source 1..20: mol_type = other DNA
ttgagaaacattgtaggaga

SEQ ID NO: 71872 - DNA, 20 bp, synthetic construct
  misc_feature 1..20: note = Description of Artificial Sequence: Synthetic oligonucleotide
  misc_feature 1..20: note = Target: SCN10A; (+) strand; PAM type: YTN; PAM sequence: TTG
  source 1..20: mol_type = other DNA
agaaacattgtaggagatgg

SEQ ID NO: 71873 - DNA, 20 bp, synthetic construct
  misc_feature 1..20: note = Description of Artificial Sequence: Synthetic oligonucleotide
  misc_feature 1..20: note = Target: SCN10A; (+) strand; PAM type: YTN; PAM sequence: TTG
  source 1..20: mol_type = other DNA
taggagatggagagagatga

SEQ ID NO: 71874 - DNA, 20 bp, synthetic construct
  misc_feature 1..20: note = Description of Artificial Sequence: Synthetic oligonucleotide
  misc_feature 1..20: note = Target: SCN10A; (+) strand; PAM type: YTN; PAM sequence: TTG
  source 1..20: mol_type = other DNA
ctctgctaaacaaagtaaga

SEQ ID NO: 71875 - DNA, 20 bp, synthetic construct
  misc_feature 1..20: note = Description of Artificial Sequence: Synthetic oligonucleotide
  misc_feature 1..20: note = Target: SCN10A; (+) strand; PAM type: YTN; PAM sequence: CTC
  source 1..20: mol_type = other DNA
tgctaaacaaagtaagaata

SEQ ID NO: 71876 - DNA, 20 bp, synthetic construct
  misc_feature 1..20: note = Description of Artificial Sequence: Synthetic oligonucleotide
  misc_feature 1..20: note = Target: SCN10A; (+) strand; PAM type: YTN; PAM sequence: CTG
  source 1..20: mol_type = other DNA
ctaaacaaagtaagaataag

SEQ ID NO: 71877 - DNA, 20 bp, synthetic construct
  misc_feature 1..20: note = Description of Artificial Sequence: Synthetic oligonucleotide
  misc_feature 1..20: note = Target: SCN10A; (+) strand; PAM type: YTN; PAM sequence: CTA
  source 1..20: mol_type = other DNA
aacaaagtaagaataagttg

SEQ ID NO: 71878 - DNA, 20 bp, synthetic construct
  misc_feature 1..20: note = Description of Artificial Sequence: Synthetic oligonucleotide
  misc_feature 1..20: note = Target: SCN10A; (+) strand; PAM type: YTN; PAM sequence: TTG
  source 1..20: mol_type = other DNA
gagttcccagggacaattga

SEQ ID NO: 71879 - DNA, 20 bp, synthetic construct
  misc_feature 1..20: note = Description of Artificial Sequence: Synthetic oligonucleotide
  misc_feature 1..20: note = Target: SCN10A; (+) strand; PAM type: YTN; PAM sequence: TTC
  source 1..20: mol_type = other DNA
ccagggacaattgaggagag

SEQ ID NO: 71880 - DNA, 20 bp, synthetic construct
  misc_feature 1..20: note = Description of Artificial Sequence: Synthetic oligonucleotide
  misc_feature 1..20: note = Target: SCN10A; (+) strand; PAM type: YTN; PAM sequence: TTG
  source 1..20: mol_type = other DNA
aggagagagttggaacatcc

SEQ ID NO: 71881 - DNA, 20 bp, synthetic construct
  misc_feature 1..20: note = Description of Artificial Sequence: Synthetic oligonucleotide
  misc_feature 1..20: note = Target: SCN10A; (+) strand; PAM type: YTN; PAM sequence: TTG
  source 1..20: mol_type = other DNA
gaacatcccaaagggacagt

SEQ ID NO: 71882 - DNA, 20 bp, synthetic construct
  misc_feature 1..20: note = Description of Artificial Sequence: Synthetic oligonucleotide
  misc_feature 1..20: note = Target: SCN10A; (+) strand; PAM type: YTN; PAM sequence: TTT
  source 1..20: mol_type = other DNA
atgaaagaagattacaggcc

SEQ ID NO: 71883 - DNA, 20 bp, synthetic construct
  misc_feature 1..20: note = Description of Artificial Sequence: Synthetic oligonucleotide
  misc_feature 1..20: note = Target: SCN10A; (+) strand; PAM type: YTN; PAM sequence: TTA
  source 1..20: mol_type = other DNA
tgaaagaagattacaggcca

SEQ ID NO: 71884 - DNA, 20 bp, synthetic construct
  misc_feature 1..20: note = Description of Artificial Sequence: Synthetic oligonucleotide
  misc_feature 1..20: note = Target: SCN10A; (+) strand; PAM type: YTN; PAM sequence: TTA
  source 1..20: mol_type = other DNA
caggccagcctcatttagca

SEQ ID NO: 71885 - DNA, 20 bp, synthetic construct
  misc_feature 1..20: note = Description of Artificial Sequence: Synthetic oligonucleotide
  misc_feature 1..20: note = Target: SCN10A; (+) strand; PAM type: YTN; PAM sequence: CTC
  source 1..20: mol_type = other DNA
atttagcaaaatagataaaa

SEQ ID NO: 71886 - DNA, 20 bp, synthetic construct
  misc_feature 1..20: note = Description of Artificial Sequence: Synthetic oligonucleotide
  misc_feature 1..20: note = Target: SCN10A; (+) strand; PAM type: YTN; PAM sequence: TTT
  source 1..20: mol_type = other DNA
agcaaaatagataaaatgaa

SEQ ID NO: 71887 - DNA, 20 bp, synthetic construct
  misc_feature 1..20: note = Description of Artificial Sequence: Synthetic oligonucleotide
  misc_feature 1..20: note = Target: SCN10A; (+) strand; PAM type: YTN; PAM sequence: TTA
  source 1..20: mol_type = other DNA
gcaaaatagataaaatgaaa

SEQ ID NO: 71888 - DNA, 20 bp, synthetic construct
  misc_feature 1..20: note = Description of Artificial Sequence: Synthetic oligonucleotide
  misc_feature 1..20: note = Target: SCN10A; (+) strand; PAM type: YTN; PAM sequence: CTA
  source 1..20: mol_type = other DNA
attgaatccagcaaaatgat

SEQ ID NO: 71889 - DNA, 20 bp, synthetic construct
  misc_feature 1..20: note = Description of Artificial Sequence: Synthetic oligonucleotide
  misc_feature 1..20: note = Target: SCN10A; (+) strand; PAM type: YTN; PAM sequence: TTG
  source 1..20: mol_type = other DNA
aatccagcaaaatgatcagc

SEQ ID NO: 71890 - DNA, 20 bp, synthetic construct
  misc_feature 1..20: note = Description of Artificial Sequence: Synthetic oligonucleotide
  misc_feature 1..20: note = Target: SCN10A; (+) strand; PAM type: YTN; PAM sequence: CTG
  source 1..20: mol_type = other DNA
gaaccattaaaaatagacta

SEQ ID NO: 71891 - DNA, 20 bp, synthetic construct
  misc_feature 1..20: note = Description of Artificial Sequence: Synthetic oligonucleotide
  misc_feature 1..20: note = Target: SCN10A; (+) strand; PAM type: YTN; PAM sequence: TTA
  source 1..20: mol_type = other DNA
aaaatagactaacaaacctg

SEQ ID NO: 71892 - DNA, 20 bp, synthetic construct
  misc_feature 1..20: note = Description of Artificial Sequence: Synthetic oligonucleotide
  misc_feature 1..20: note = Target: SCN10A; (+) strand; PAM type: YTN; PAM sequence: CTA
  source 1..20: mol_type = other DNA
acaaacctgttagtttacag

SEQ ID NO: 71893 - DNA, 20 bp, synthetic construct
  misc_feature 1..20: note = Description of Artificial Sequence: Synthetic oligonucleotide
  misc_feature 1..20: note = Target: SCN10A; (+) strand; PAM type: YTN; PAM sequence: CTG
  source 1..20: mol_type = other DNA
ttagtttacagatttactat

SEQ ID NO: 71894 - DNA, 20 bp, synthetic construct
  misc_feature 1..20: note = Description of Artificial Sequence: Synthetic oligonucleotide
  misc_feature 1..20: note = Target: SCN10A; (+) strand; PAM type: YTN; PAM sequence: TTA
  source 1..20: mol_type = other DNA
gtttacagatttactatact

SEQ ID NO: 71895 - DNA, 20 bp, synthetic construct
  misc_feature 1..20: note = Description of Artificial Sequence: Synthetic oligonucleotide
  misc_feature 1..20: note = Target: SCN10A; (+) strand; PAM type: YTN; PAM sequence: TTT
  source 1..20: mol_type = other DNA
acagatttactatactaaca

SEQ ID NO: 71896 - DNA, 20 bp, synthetic construct
  misc_feature 1..20: note = Description of Artificial Sequence: Synthetic oligonucleotide
  misc_feature 1..20: note = Target: SCN10A; (+) strand; PAM type: YTN; PAM sequence: TTA
  source 1..20: mol_type = other DNA
cagatttactatactaacag

SEQ ID NO: 71897 - DNA, 20 bp, synthetic construct
  misc_feature 1..20: note = Description of Artificial Sequence: Synthetic oligonucleotide
  misc_feature 1..20: note = Target: SCN10A; (+) strand; PAM type: YTN; PAM sequence: TTT
  source 1..20: mol_type = other DNA
actatactaacagatgaaag

SEQ ID NO: 71898 - DNA, 20 bp, synthetic construct
  misc_feature 1..20: note = Description of Artificial Sequence: Synthetic oligonucleotide
  misc_feature 1..20: note = Target: SCN10A; (+) strand; PAM type: YTN; PAM sequence: TTA
  source 1..20: mol_type = other DNA
ctatactaacagatgaaaga

SEQ ID NO: 71899 - DNA, 20 bp, synthetic construct
  misc_feature 1..20: note = Description of Artificial Sequence: Synthetic oligonucleotide
  misc_feature 1..20: note = Target: SCN10A; (+) strand; PAM type: YTN; PAM sequence: CTA
  source 1..20: mol_type = other DNA
tactaacagatgaaagacta

SEQ ID NO: 71900 - DNA, 20 bp, synthetic construct
  misc_feature 1..20: note = Description of Artificial Sequence: Synthetic oligonucleotide
  misc_feature 1..20: note = Target: SCN10A; (+) strand; PAM type: YTN; PAM sequence: CTA
  source 1..20: mol_type = other DNA
acagatgaaagactatatga

SEQ ID NO: 71901 - DNA, 20 bp, synthetic construct
  misc_feature 1..20: note = Description of Artificial Sequence: Synthetic oligonucleotide
  misc_feature 1..20: note = Target: SCN10A; (+) strand; PAM type: YTN; PAM sequence: CTA
  source 1..20: mol_type = other DNA
tatgataacctcaataaata

SEQ ID NO: 71902 - DNA, 20 bp, synthetic construct
  misc_feature 1..20: note = Description of Artificial Sequence: Synthetic oligonucleotide
  misc_feature 1..20: note = Target: SCN10A; (+) strand; PAM type: YTN; PAM sequence: CTC
  source 1..20: mol_type = other DNA
aataaatataaaaatactga

SEQ ID NO: 71903 - DNA, 20 bp, synthetic construct
  misc_feature 1..20: note = Description of Artificial Sequence: Synthetic oligonucleotide
  misc_feature 1..20: note = Target: SCN10A; (+) strand; PAM type: YTN; PAM sequence: CTG
  source 1..20: mol_type = other DNA
atagaagccaacacccattc

SEQ ID NO: 71904 - DNA, 20 bp, synthetic construct
  misc_feature 1..20: note = Description of Artificial Sequence: Synthetic oligonucleotide
  misc_feature 1..20: note = Target: SCN10A; (+) strand; PAM type: YTN; PAM sequence: TTC
  source 1..20: mol_type = other DNA
atgatgaaagtctcaacaaa

SEQ ID NO: 71905 - DNA, 20 bp, synthetic construct
  misc_feature 1..20: note = Description of Artificial Sequence: Synthetic oligonucleotide
  misc_feature 1..20: note = Target: SCN10A; (+) strand; PAM type: YTN; PAM sequence: CTC
  source 1..20: mol_type = other DNA
aacaaacaagaaatggaaaa

SEQ ID NO: 71906 - DNA, 20 bp, synthetic construct
  misc_feature 1..20: note = Description of Artificial Sequence: Synthetic oligonucleotide
  misc_feature 1..20: note = Target: SCN10A; (+) strand; PAM type: YTN; PAM sequence: TTG
  source 1..20: mol_type = other DNA
atataaaaagtaattatgag

SEQ ID NO: 71907 - DNA, 20 bp, synthetic construct
  misc_feature 1..20: note = Description of Artificial Sequence: Synthetic oligonucleotide
  misc_feature 1..20: note = Target: SCN10A; (+) strand; PAM type: YTN; PAM sequence: TTA
  source 1..20: mol_type = other DNA
tgagactctcataaacatca

SEQ ID NO: 71908 - DNA, 20 bp, synthetic construct
  misc_feature 1..20: note = Description of Artificial Sequence: Synthetic oligonucleotide
  misc_feature 1..20: note = Target: SCN10A; (+) strand; PAM type: YTN; PAM sequence: CTC
  source 1..20: mol_type = other DNA
tcataaacatcataatagtg

SEQ ID NO: 71909 - DNA, 20 bp, synthetic construct
  misc_feature 1..20: note = Description of Artificial Sequence: Synthetic oligonucleotide
  misc_feature 1..20: note = Target: SCN10A; (+) strand; PAM type: YTN; PAM sequence: CTC
  source 1..20: mol_type = other DNA
ataaacatcataatagtgaa

SEQ ID NO: 71910 - DNA, 20 bp, synthetic construct
  misc_feature 1..20: note = Description of Artificial Sequence: Synthetic oligonucleotide
  misc_feature 1..20: note = Target: SCN10A; (+) strand; PAM type: YTN; PAM sequence: TTA
  source 1..20: mol_type = other DNA
gaagcacacactttaaaatc

SEQ ID NO: 71911 - DNA, 20 bp, synthetic construct
  misc_feature 1..20: note = Description of Artificial Sequence: Synthetic oligonucleotide
  misc_feature 1..20: note = Target: SCN10A; (+) strand; PAM type: YTN; PAM sequence: CTT
  source 1..20: mol_type = other DNA
taaaatcaagagcaaaataa

SEQ ID NO: 71912 - DNA, 20 bp, synthetic construct
  misc_feature 1..20: note = Description of Artificial Sequence: Synthetic oligonucleotide
  misc_feature 1..20: note = Target: SCN10A; (+) strand; PAM type: YTN; PAM sequence: TTT
  source 1..20: mol_type = other DNA
aaaatcaagagcaaaataaa

SEQ ID NO: 71913 - DNA, 20 bp, synthetic construct
  misc_feature 1..20: note = Description of Artificial Sequence: Synthetic oligonucleotide
  misc_feature 1..20: note = Target: SCN10A; (+) strand; PAM type: YTN; PAM sequence: TTA
  source 1..20: mol_type = other DNA
aaatcaagagcaaaataaat

SEQ ID NO: 71914 - DNA, 20 bp, synthetic construct
  misc_feature 1..20: note = Description of Artificial Sequence: Synthetic oligonucleotide
  misc_feature 1..20: note = Target: SCN10A; (+) strand; PAM type: YTN; PAM sequence: CTC
  source 1..20: mol_type = other DNA
actgtcatagctttgaatta

SEQ ID NO: 71915 - DNA, 20 bp, synthetic construct
  misc_feature 1..20: note = Description of Artificial Sequence: Synthetic oligonucleotide
  misc_feature 1..20: note = Target: SCN10A; (+) strand; PAM type: YTN; PAM sequence: CTG
  source 1..20: mol_type = other DNA
tcatagctttgaattaccat

SEQ ID NO: 71916 - DNA, 20 bp, synthetic construct
  misc_feature 1..20: note = Description of Artificial Sequence: Synthetic oligonucleotide
  misc_feature 1..20: note = Target: SCN10A; (+) strand; PAM type: YTN; PAM sequence: CTT
  source 1..20: mol_type = other DNA
tgaattaccatcttgttgaa

SEQ ID NO: 71917 - DNA, 20 bp, synthetic construct
  misc_feature 1..20: note = Description of Artificial Sequence: Synthetic oligonucleotide
  misc_feature 1..20: note = Target: SCN10A; (+) strand; PAM type: YTN; PAM sequence: TTT
  source 1..20: mol_type = other DNA
gaattaccatcttgttgaag

SEQ ID NO: 71918 - DNA, 20 bp, synthetic construct
  misc_feature 1..20: note = Description of Artificial Sequence: Synthetic oligonucleotide
  misc_feature 1..20: note = Target: SCN10A; (+) strand; PAM type: YTN; PAM sequence: TTG
  source 1..20: mol_type = other DNA
aattaccatcttgttgaagg

SEQ ID NO: 71919 - DNA, 20 bp, synthetic construct
  misc_feature 1..20: note = Description of Artificial Sequence: Synthetic oligonucleotide
  misc_feature 1..20: note = Target: SCN10A; (+) strand; PAM type: YTN; PAM sequence: TTA
  source 1..20: mol_type = other DNA
ccatcttgttgaaggtcccg

SEQ ID NO: 71920 - DNA, 20 bp, synthetic construct
  misc_feature 1..20: note = Description of Artificial Sequence: Synthetic oligonucleotide
  misc_feature 1..20: note = Target: SCN10A; (+) strand; PAM type: YTN; PAM sequence: CTT
  source 1..20: mol_type = other DNA
gttgaaggtcccggccaatt

SEQ ID NO: 71921 - DNA, 20 bp, synthetic construct
  misc_feature 1..20: note = Description of Artificial Sequence: Synthetic oligonucleotide
  misc_feature 1..20: note = Target: SCN10A; (+) strand; PAM type: YTN; PAM sequence: TTG
  source 1..20: mol_type = other DNA
ttgaaggtcccggccaattc

SEQ ID NO: 71922 - DNA, 20 bp, synthetic construct
  misc_feature 1..20: note = Description of Artificial Sequence: Synthetic oligonucleotide
  misc_feature 1..20: note = Target: SCN10A; (+) strand; PAM type: YTN; PAM sequence: TTG
  source 1..20: mol_type = other DNA
aaggtcccggccaattcaat

SEQ ID NO: 71923 - DNA, 20 bp, synthetic construct
  misc_feature 1..20: note = Description of Artificial Sequence: Synthetic oligonucleotide
  misc_feature 1..20: note = Target: SCN10A; (+) strand; PAM type: YTN; PAM sequence: TTC
  source 1..20: mol_type = other DNA
aataagacaggaaaaataaa

SEQ ID NO: 71924 - DNA, 20 bp, synthetic construct
  misc_feature 1..20: note = Description of Artificial Sequence: Synthetic oligonucleotide
  misc_feature 1..20: note = Target: SCN10A; (+) strand; PAM type: YTN; PAM sequence: TTT
  source 1..20: mol_type = other DNA
gtcattatttgcagataata

SEQ ID NO: 71925 - DNA, 20 bp, synthetic construct
  misc_feature 1..20: note = Description of Artificial Sequence: Synthetic oligonucleotide
  misc_feature 1..20: note = Target: SCN10A; (+) strand; PAM type: YTN; PAM sequence: TTG
  source 1..20: mol_type = other DNA
tcattatttgcagataatat

SEQ ID NO: 71926 - DNA, 20 bp, synthetic construct
  misc_feature 1..20: note = Description of Artificial Sequence: Synthetic oligonucleotide
  misc_feature 1..20: note = Target: SCN10A; (+) strand; PAM type: YTN; PAM sequence: TTA
  source 1..20: mol_type = other DNA
tttgcagataatataactgt

SEQ ID NO: 71927 - DNA, 20 bp, synthetic construct
  misc_feature 1..20: note = Description of Artificial Sequence: Synthetic oligonucleotide
  misc_feature 1..20: note = Target: SCN10A; (+) strand; PAM type: YTN; PAM sequence: TTT
  source 1..20: mol_type = other DNA
gcagataatataactgtcta

SEQ ID NO: 71928 - DNA, 20 bp, synthetic construct
  misc_feature 1..20: note = Description of Artificial Sequence: Synthetic oligonucleotide
  misc_feature 1..20: note = Target: SCN10A; (+) strand; PAM type: YTN; PAM sequence: TTG
  source 1..20: mol_type = other DNA
cagataatataactgtctaa

SEQ ID NO: 71929 - DNA, 20 bp, synthetic construct
  misc_feature 1..20: note = Description of Artificial Sequence: Synthetic oligonucleotide
  misc_feature 1..20: note = Target: SCN10A; (+) strand; PAM type: YTN; PAM sequence: CTG
  source 1..20: mol_type = other DNA
tctaaataggaagtccaagg

SEQ ID NO: 71930 - DNA, 20 bp, synthetic construct
  misc_feature 1..20: note = Description of Artificial Sequence: Synthetic oligonucleotide
  misc_feature 1..20: note = Target: SCN10A; (+) strand; PAM type: YTN; PAM sequence: CTA
  source 1..20: mol_type = other DNA
aataggaagtccaagggaat

SEQ ID NO: 71931 - DNA, 20 bp, synthetic construct
  misc_feature 1..20: note = Description of Artificial Sequence: Synthetic oligonucleotide
  misc_feature 1..20: note = Target: SCN10A; (+) strand; PAM type: YTN; PAM sequence: CTA
  source 1..20: mol_type = other DNA
cagaaaaatttaactttaag

SEQ ID NO: 71932 - DNA, 20 bp, synthetic construct
  misc_feature 1..20: note = Description of Artificial Sequence: Synthetic oligonucleotide
  misc_feature 1..20: note = Target: SCN10A; (+) strand; PAM type: YTN; PAM sequence: TTT
  source 1..20: mol_type = other DNA
aactttaaggagctcagcag

SEQ ID NO: 71933 - DNA, 20 bp, synthetic construct
  misc_feature 1..20: note = Description of Artificial Sequence: Synthetic oligonucleotide
  misc_feature 1..20: note = Target: SCN10A; (+) strand; PAM type: YTN; PAM sequence: TTA
  source 1..20: mol_type = other DNA
actttaaggagctcagcagg

SEQ ID NO: 71934 - DNA, 20 bp, synthetic construct
  misc_feature 1..20: note = Description of Artificial Sequence: Synthetic oligonucleotide
  misc_feature 1..20: note = Target: SCN10A; (+) strand; PAM type: YTN; PAM sequence: CTT
  source 1..20: mol_type = other DNA
taaggagctcagcagggttg

SEQ ID NO: 71935 - DNA, 20 bp, synthetic construct
  misc_feature 1..20: note = Description of Artificial Sequence: Synthetic oligonucleotide
  misc_feature 1..20: note = Target: SCN10A; (+) strand; PAM type: YTN; PAM sequence: TTT
  source 1..20: mol_type = other DNA
aaggagctcagcagggttgc

SEQ ID NO: 71936 - DNA, 20 bp, synthetic construct
  misc_feature 1..20: note = Description of Artificial Sequence: Synthetic oligonucleotide
  misc_feature 1..20: note = Target: SCN10A; (+) strand; PAM type: YTN; PAM sequence: TTA
  source 1..20: mol_type = other DNA
aggagctcagcagggttgct

SEQ ID NO: 71937 - DNA, 20 bp, synthetic construct
  misc_feature 1..20: note = Description of Artificial Sequence: Synthetic oligonucleotide
  misc_feature 1..20: note = Target: SCN10A; (+) strand; PAM type: YTN; PAM sequence: CTC
  source 1..20: mol_type = other DNA
agcagggttgctggatgcaa

SEQ ID NO: 71938 - DNA, 20 bp, synthetic construct
  misc_feature 1..20: note = Description of Artificial Sequence: Synthetic oligonucleotide
  misc_feature 1..20: note = Target: SCN10A; (+) strand; PAM type: YTN; PAM sequence: TTG
  source 1..20: mol_type = other DNA
ctggatgcaaaatcactata

SEQ ID NO: 71939 - DNA, 20 bp, synthetic construct
  misc_feature 1..20: note = Description of Artificial Sequence: Synthetic oligonucleotide
  misc_feature 1..20: note = Target: SCN10A; (+) strand; PAM type: YTN; PAM sequence: CTG
  source 1..20: mol_type = other DNA
gatgcaaaatcactatatag

SEQ ID NO: 71940 - DNA, 20 bp, synthetic construct
  misc_feature 1..20: note = Description of Artificial Sequence: Synthetic oligonucleotide
  misc_feature 1..20: note = Target: SCN10A; (+) strand; PAM type: YTN; PAM sequence: CTA
  source 1..20: mol_type = other DNA
tatagaaattaataatatta

SEQ ID NO: 71941 - DNA, 20 bp, synthetic construct
  misc_feature 1..20: note = Description of Artificial Sequence: Synthetic oligonucleotide
  misc_feature 1..20: note = Target: SCN10A; (+) strand; PAM type: YTN; PAM sequence: TTA
  source 1..20: mol_type = other DNA
ataatattaagacagtttag

SEQ ID NO: 71942 - DNA, 20 bp, synthetic construct
  misc_feature 1..20: note = Description of Artificial Sequence: Synthetic oligonucleotide
  misc_feature 1..20: note = Target: SCN10A; (+) strand; PAM type: YTN; PAM sequence: TTA
  source 1..20: mol_type = other DNA
agacagtttagcaataataa

SEQ ID NO: 71943 - DNA, 20 bp, synthetic construct
  misc_feature 1..20: note = Description of Artificial Sequence: Synthetic oligonucleotide
  misc_feature 1..20: note = Target: SCN10A; (+) strand; PAM type: YTN; PAM sequence: TTT
  source 1..20: mol_type = other DNA
agcaataataagtattcaat

SEQ ID NO: 71944 - DNA, 20 bp, synthetic construct
  misc_feature 1..20: note = Description of Artificial Sequence: Synthetic oligonucleotide
  misc_feature 1..20: note = Target: SCN10A; (+) strand; PAM type: YTN; PAM sequence: TTA
  source 1..20: mol_type = other DNA
gcaataataagtattcaata

SEQ ID NO: 71945 - DNA, 20 bp, synthetic construct
  misc_feature 1..20: note = Description of Artificial Sequence: Synthetic oligonucleotide
  misc_feature 1..20: note = Target: SCN10A; (+) strand; PAM type: YTN; PAM sequence: TTC
  source 1..20: mol_type = other DNA
aatagggcaaccaaaattgc

SEQ ID NO: 71946 - DNA, 20 bp, synthetic construct
  misc_feature 1..20: note = Description of Artificial Sequence: Synthetic oligonucleotide
  misc_feature 1..20: note = Target: SCN10A; (+) strand; PAM type: YTN; PAM sequence: TTG
  source 1..20: mol_type = other DNA
caatgtacctaggaaaaaga

SEQ ID NO: 71947 - DNA, 20 bp, synthetic construct
  misc_feature 1..20: note = Description of Artificial Sequence: Synthetic oligonucleotide
  misc_feature 1..20: note = Target: SCN10A; (+) strand; PAM type: YTN; PAM sequence: CTA
  source 1..20: mol_type = other DNA
ggaaaaagacattataaaat

SEQ ID NO: 71948 - DNA, 20 bp, synthetic construct
  misc_feature 1..20: note = Description of Artificial Sequence: Synthetic oligonucleotide
  misc_feature 1..20: note = Target: SCN10A; (+) strand; PAM type: YTN; PAM sequence: TTA
  source 1..20: mol_type = other DNA
taaaatgtagaaaaatatta

SEQ ID NO: 71949 - DNA, 20 bp, synthetic construct
  misc_feature 1..20: note = Description of Artificial Sequence: Synthetic oligonucleotide
  misc_feature 1..20: note = Target: SCN10A; (+) strand; PAM type: YTN; PAM sequence: TTA
  source 1..20: mol_type = other DNA
aagaagacctgtataaatta

SEQ ID NO: 71950 - DNA, 20 bp, synthetic construct
  misc_feature 1..20: note = Description of Artificial Sequence: Synthetic oligonucleotide
  misc_feature 1..20: note = Target: SCN10A; (+) strand; PAM type: YTN; PAM sequence: CTG
  source 1..20: mol_type = other DNA
tataaattaagagatctgcc

SEQ ID NO: 71951 - DNA, 20 bp, synthetic construct
  misc_feature 1..20: note = Description of Artificial Sequence: Synthetic oligonucleotide
  misc_feature 1..20: note = Target: SCN10A; (+) strand; PAM type: YTN; PAM sequence: TTA
  source 1..20: mol_type = other DNA
agagatctgccatactgatg

SEQ ID NO: 71952 - DNA, 20 bp, synthetic construct
  misc_feature 1..20: note = Description of Artificial Sequence: Synthetic oligonucleotide
  misc_feature 1..20: note = Target: SCN10A; (+) strand; PAM type: YTN; PAM sequence: CTG
  source 1..20: mol_type = other DNA
ccatactgatgtgtgggaag

SEQ ID NO: 71953 - DNA, 20 bp, synthetic construct
  misc_feature 1..20: note = Description of Artificial Sequence: Synthetic oligonucleotide
  misc_feature 1..20: note = Target: SCN10A; (+) strand; PAM type: YTN; PAM sequence: CTG
  source 1..20: mol_type = other DNA
atgtgtgggaaggcttcgta

SEQ ID NO: 71954 - DNA, 20 bp, synthetic construct
  misc_feature 1..20: note = Description of Artificial Sequence: Synthetic oligonucleotide
  misc_feature 1..20: note = Target: SCN10A; (+) strand; PAM type: YTN; PAM sequence: CTT
  source 1..20: mol_type = other DNA
cgtattgtaaatgtggcgat

SEQ ID NO: 71955 - DNA, 20 bp, synthetic construct
  misc_feature 1..20: note = Description of Artificial Sequence: Synthetic oligonucleotide
  misc_feature 1..20: note = Target: SCN10A; (+) strand; PAM type: YTN; PAM sequence: TTC
  source 1..20: mol_type = other DNA
gtattgtaaatgtggcgatt

SEQ ID NO: 71956 - DNA, 20 bp, synthetic construct
  misc_feature 1..20: note = Description of Artificial Sequence: Synthetic oligonucleotide
  misc_feature 1..20: note = Target: SCN10A; (+) strand; PAM type: YTN; PAM sequence: TTG
  source 1..20: mol_type = other DNA
taaatgtggcgattcttcct

SEQ ID NO: 71957 - DNA, 20 bp, synthetic construct
  misc_feature 1..20: note = Description of Artificial Sequence: Synthetic oligonucleotide
  misc_feature 1..20: note = Target: SCN10A; (+) strand; PAM type: YTN; PAM sequence: TTC
  source 1..20: mol_type = other DNA
ttcctgtggtgataaatcaa

SEQ ID NO: 71958 - DNA, 20 bp, synthetic construct
  misc_feature 1..20: note = Description of Artificial Sequence: Synthetic oligonucleotide
  misc_feature 1..20: note = Target: SCN10A; (+) strand; PAM type: YTN; PAM sequence: CTT
  source 1..20: mol_type = other DNA
cctgtggtgataaatcaatt

SEQ ID NO: 71959 - DNA, 20 bp, synthetic construct
  misc_feature 1..20: note = Description of Artificial Sequence: Synthetic oligonucleotide
  misc_feature 1..20: note = Target: SCN10A; (+) strand; PAM type: YTN; PAM sequence: TTC
  source 1..20: mol_type = other DNA
ctgtggtgataaatcaattc

SEQ ID NO: 71960 - DNA, 20 bp, synthetic construct
  misc_feature 1..20: note = Description of Artificial Sequence: Synthetic oligonucleotide
  misc_feature 1..20: note = Target: SCN10A; (+) strand; PAM type: YTN; PAM sequence: CTG
  source 1..20: mol_type = other DNA
tggtgataaatcaattcagt

SEQ ID NO: 71961 - DNA, 20 bp, synthetic construct
  misc_feature 1..20: note = Description of Artificial Sequence: Synthetic oligonucleotide
  misc_feature 1..20: note = Target: SCN10A; (+) strand; PAM type: YTN; PAM sequence: TTC
  source 1..20: mol_type = other DNA
agtgcattaccaaacaaagt

SEQ ID NO: 71962 - DNA, 20 bp, synthetic construct
  misc_feature 1..20: note = Description of Artificial Sequence: Synthetic oligonucleotide
  misc_feature 1..20: note = Target: SCN10A; (+) strand; PAM type: YTN; PAM sequence: TTA
  source 1..20: mol_type = other DNA
ccaaacaaagtttccacaga

SEQ ID NO: 71963 - DNA, 20 bp, synthetic construct
  misc_feature 1..20: note = Description of Artificial Sequence: Synthetic oligonucleotide
  misc_feature 1..20: note = Target: SCN10A; (+) strand; PAM type: YTN; PAM sequence: TTT
  source 1..20: mol_type = other DNA
ccacagagttgtaagaaaag

SEQ ID NO: 71964 - DNA, 20 bp, synthetic construct
  misc_feature 1..20: note = Description of Artificial Sequence: Synthetic oligonucleotide
  misc_feature 1..20: note = Target: SCN10A; (+) strand; PAM type: YTN; PAM sequence: TTC
  source 1..20: mol_type = other DNA
cacagagttgtaagaaaaga

SEQ ID NO: 71965 - DNA, 20 bp, synthetic construct
  misc_feature 1..20: note = Description of Artificial Sequence: Synthetic oligonucleotide
  misc_feature 1..20: note = Target: SCN10A; (+) strand; PAM type: YTN; PAM sequence: TTG
  source 1..20: mol_type = other DNA
taagaaaagagctggaaaat

SEQ ID NO: 71966 - DNA, 20 bp, synthetic construct
  misc_feature 1..20: note = Description of Artificial Sequence: Synthetic oligonucleotide
  misc_feature 1..20: note = Target: SCN10A; (+) strand; PAM type: YTN; PAM sequence: CTG
  source 1..20: mol_type = other DNA
gaaaatgtgacccttaaact

SEQ ID NO: 71967 - DNA, 20 bp, synthetic construct
  misc_feature 1..20: note = Description of Artificial Sequence: Synthetic oligonucleotide
  misc_feature 1..20: note = Target: SCN10A; (+) strand; PAM type: YTN; PAM sequence: CTT
  source 1..20: mol_type = other DNA
aaactgatatggaaaagtaa

SEQ ID NO: 71968 - DNA, 20 bp, synthetic construct
  misc_feature 1..20: note = Description of Artificial Sequence: Synthetic oligonucleotide
  misc_feature 1..20: note = Target: SCN10A; (+) strand; PAM type: YTN; PAM sequence: TTA
  source 1..20: mol_type = other DNA
aactgatatggaaaagtaaa

SEQ ID NO: 71969 - DNA, 20 bp, synthetic construct
  misc_feature 1..20: note = Description of Artificial Sequence: Synthetic oligonucleotide
  misc_feature 1..20: note = Target: SCN10A; (+) strand; PAM type: YTN; PAM sequence: CTG
  source 1..20: mol_type = other DNA
atatggaaaagtaaagaaac

SEQ ID NO: 71970 - DNA, 20 bp, synthetic construct
  misc_feature 1..20: note = Description of Artificial Sequence: Synthetic oligonucleotide
  misc_feature 1..20: note = Target: SCN10A; (+) strand; PAM type: YTN; PAM sequence: TTT
  source 1..20: mol_type = other DNA
tcaagaagacaaataaggag

SEQ ID NO: 71971 - DNA, 20 bp, synthetic construct
  misc_feature 1..20: note = Description of Artificial Sequence: Synthetic oligonucleotide
  misc_feature 1..20: note = Target: SCN10A; (+) strand; PAM type: YTN; PAM sequence: TTT
  source 1..20: mol_type = other DNA
caagaagacaaataaggagg

SEQ ID NO: 71972 - DNA, 20 bp, synthetic construct
  misc_feature 1..20: note = Description of Artificial Sequence: Synthetic oligonucleotide
  misc_feature 1..20: note = Target: SCN10A; (+) strand; PAM type: YTN; PAM sequence: TTC
  source 1..20: mol_type = other DNA
aagaagacaaataaggaggg

SEQ ID NO: 71973 - DNA, 20 bp, synthetic construct
  misc_feature 1..20: note = Description of Artificial Sequence: Synthetic oligonucleotide
  misc_feature 1..20: note = Target: SCN10A; (+) strand; PAM type: YTN; PAM sequence: CTT
  source 1..20: mol_type = other DNA
actatagagcatttaaatcc

SEQ ID NO: 71974 - DNA, 20 bp, synthetic construct
  misc_feature 1..20: note = Description of Artificial Sequence: Synthetic oligonucleotide
  misc_feature 1..20: note = Target: SCN10A; (+) strand; PAM type: YTN; PAM sequence: TTA
  source 1..20: mol_type = other DNA
ctatagagcatttaaatcca

SEQ ID NO: 71975 - DNA, 20 bp, synthetic construct
  misc_feature 1..20: note = Description of Artificial Sequence: Synthetic oligonucleotide
  misc_feature 1..20: note = Target: SCN10A; (+) strand; PAM type: YTN; PAM sequence: CTA
  source 1..20: mol_type = other DNA
tagagcatttaaatccacgt

SEQ ID NO: 71976 - DNA, 20 bp, synthetic construct
  misc_feature 1..20: note = Description of Artificial Sequence: Synthetic oligonucleotide
  misc_feature 1..20: note = Target: SCN10A; (+) strand; PAM type: YTN; PAM sequence: TTT
  source 1..20: mol_type = other DNA
aaatccacgtggtgttgact

SEQ ID NO: 71977 - DNA, 20 bp, synthetic construct
  misc_feature 1..20: note = Description of Artificial Sequence: Synthetic oligonucleotide
  misc_feature 1..20: note = Target: SCN10A; (+) strand; PAM type: YTN; PAM sequence: TTA
  source 1..20: mol_type = other DNA
aatccacgtggtgttgactc

SEQ ID NO: 71978 - DNA, 20 bp, synthetic construct
  misc_feature 1..20: note = Description of Artificial Sequence: Synthetic oligonucleotide
  misc_feature 1..20: note = Target: SCN10A; (+) strand; PAM type: YTN; PAM sequence: TTG
  source 1..20: mol_type = other DNA
actcaggatgtgacaatgag

SEQ ID NO: 71979 - DNA, 20 bp, synthetic construct
  misc_feature 1..20: note = Description of Artificial Sequence: Synthetic oligonucleotide
  misc_feature 1..20: note = Target: SCN10A; (+) strand; PAM type: YTN; PAM sequence: CTC
  source 1..20: mol_type = other DNA
aggatgtgacaatgagatta

SEQ ID NO: 71980 - DNA, 20 bp, synthetic construct
  misc_feature 1..20: note = Description of Artificial Sequence: Synthetic oligonucleotide
  misc_feature 1..20: note = Target: SCN10A; (+) strand; PAM type: YTN; PAM sequence: TTA
  source 1..20: mol_type = other DNA
ctgggagaaacagattcagt

SEQ ID NO: 71981 - DNA, 20 bp, synthetic construct
  misc_feature 1..20: note = Description of Artificial Sequence: Synthetic oligonucleotide
  misc_feature 1..20: note = Target: SCN10A; (+) strand; PAM type: YTN; PAM sequence: CTG
  source 1..20: mol_type = other DNA
ggagaaacagattcagtaga

SEQ ID NO: 71982 - DNA, 20 bp, synthetic construct
  misc_feature 1..20: note = Description of Artificial Sequence: Synthetic oligonucleotide
  misc_feature 1..20: note = Target: SCN10A; (+) strand; PAM type: YTN; PAM sequence: TTC
  source 1..20: mol_type = other DNA
agtagacatgggaatctggt

SEQ ID NO: 71983 - DNA, 20 bp, synthetic construct
  misc_feature 1..20: note = Description of Artificial Sequence: Synthetic oligonucleotide
  misc_feature 1..20: note = Target: SCN10A; (+) strand; PAM type: YTN; PAM sequence: CTG
  source 1..20: mol_type = other DNA
gtgcatggcagaagcagtgg

SEQ ID NO: 71984 - DNA, 20 bp, synthetic construct
  misc_feature 1..20: note = Description of Artificial Sequence: Synthetic oligonucleotide
  misc_feature 1..20: note = Target: SCN10A; (+) strand; PAM type: YTN; PAM sequence: CTT
  source 1..20: mol_type = other DNA
gggaaatgatgtattgaaaa

SEQ ID NO: 71985 - DNA, 20 bp, synthetic construct
  misc_feature 1..20: note = Description of Artificial Sequence: Synthetic oligonucleotide
  misc_feature 1..20: note = Target: SCN10A; (+) strand; PAM type: YTN; PAM sequence: TTG
  source 1..20: mol_type = other DNA
ggaaatgatgtattgaaaaa

SEQ ID NO: 71986 - DNA, 20 bp, synthetic construct
  misc_feature 1..20: note = Description of Artificial Sequence: Synthetic oligonucleotide
  misc_feature 1..20: note = Target: SCN10A; (+) strand; PAM type: YTN; PAM sequence: TTG
  source 1..20: mol_type = other DNA
aaaaaaatgttggaataatc

SEQ ID NO: 71987 - DNA, 20 bp, synthetic construct
  misc_feature 1..20: note = Description of Artificial Sequence: Synthetic oligonucleotide
  misc_feature 1..20: note = Target: SCN10A; (+) strand; PAM type: YTN; PAM sequence: TTG
  source 1..20: mol_type = other DNA
gaataatccatatggaaaaa

SEQ ID NO: 71988 - DNA, 20 bp, synthetic construct
  misc_feature 1..20: note = Description of Artificial Sequence: Synthetic oligonucleotide
  misc_feature 1..20: note = Target: SCN10A; (+) strand; PAM type: YTN; PAM sequence: TTG
  source 1..20: mol_type = other DNA
gaagcctatctcataccaca

SEQ ID NO: 71989 - DNA, 20 bp, synthetic construct
  misc_feature 1..20: note = Description of Artificial Sequence: Synthetic oligonucleotide
  misc_feature 1..20: note = Target: SCN10A; (+) strand; PAM type: YTN; PAM sequence: CTA
  source 1..20: mol_type = other DNA
tctcataccacacacataca

SEQ ID NO: 71990 - DNA, 20 bp, synthetic construct
  misc_feature 1..20: note = Description of Artificial Sequence: Synthetic oligonucleotide
  misc_feature 1..20: note = Target: SCN10A; (+) strand; PAM type: YTN; PAM sequence: CTC
  source 1..20: mol_type = other DNA
ataccacacacatacaaaaa

SEQ ID NO: 71991 - DNA, 20 bp, synthetic construct
  misc_feature 1..20: note = Description of Artificial Sequence: Synthetic oligonucleotide
  misc_feature 1..20: note = Target: SCN10A; (+) strand; PAM type: YTN; PAM sequence: TTC
  source 1..20: mol_type = other DNA
taggagattgaaatacctaa

SEQ ID NO: 71992 - DNA, 20 bp, synthetic construct
  misc_feature 1..20: note = Description of Artificial Sequence: Synthetic oligonucleotide
  misc_feature 1..20: note = Target: SCN10A; (+) strand; PAM type: YTN; PAM sequence: CTA
  source 1..20: mol_type = other DNA
ggagattgaaatacctaaat

SEQ ID NO: 71993 - DNA, 20 bp, synthetic construct
  misc_feature 1..20: note = Description of Artificial Sequence: Synthetic oligonucleotide
  misc_feature 1..20: note = Target: SCN10A; (+) strand; PAM type: YTN; PAM sequence: TTG
  source 1..20: mol_type = other DNA
aaatacctaaatgtagaaag

SEQ ID NO: 71994 - DNA, 20 bp, synthetic construct
  misc_feature 1..20: note = Description of Artificial Sequence: Synthetic oligonucleotide
  misc_feature 1..20: note = Target: SCN10A; (+) strand; PAM type: YTN; PAM sequence: CTA
  source 1..20: mol_type = other DNA
aatgtagaaaggaaaactgt

SEQ ID NO: 71995 - DNA, 20 bp, synthetic construct
  misc_feature 1..20: note = Description of Artificial Sequence: Synthetic oligonucleotide
  misc_feature 1..20: note = Target: SCN10A; (+) strand; PAM type: YTN; PAM sequence: CTG
  source 1..20: mol_type = other DNA
taactttgaggagaaaacac

SEQ ID NO: 71996 - DNA, 20 bp, synthetic construct
  misc_feature 1..20: note = Description of Artificial Sequence: Synthetic oligonucleotide
  misc_feature 1..20: note = Target: SCN10A; (+) strand; PAM type: YTN; PAM sequence: CTT
  source 1..20: mol_type = other DNA
tgaggagaaaacacaggata

SEQ ID NO: 71997 - DNA, 20 bp, synthetic construct
  misc_feature 1..20: note = Description of Artificial Sequence: Synthetic oligonucleotide
  misc_feature 1..20: note = Target: SCN10A; (+) strand; PAM type: YTN; PAM sequence: TTT
  source 1..20: mol_type = other DNA
gaggagaaaacacaggataa

SEQ ID NO: 71998 - DNA, 20 bp, synthetic construct
  misc_feature 1..20: note = Description of Artificial Sequence: Synthetic oligonucleotide
  misc_feature 1..20: note = Target: SCN10A; (+) strand; PAM type: YTN; PAM sequence: TTG
  source 1..20: mol_type = other DNA
aggagaaaacacaggataat

SEQ ID NO: 71999 - DNA, 20 bp, synthetic construct
  misc_feature 1..20: note = Description of Artificial Sequence: Synthetic oligonucleotide
  misc_feature 1..20: note = Target: SCN10A; (+) strand; PAM type: YTN; PAM sequence: CTT
  source 1..20: mol_type = other DNA
tatggaatactatatggcaa

SEQ ID NO: 72000 - DNA, 20 bp, synthetic construct
  misc_feature 1..20: note = Description of Artificial Sequence: Synthetic oligonucleotide
  misc_feature 1..20: note = Target: SCN10A; (+) strand; PAM type: YTN; PAM sequence: TTT
  source 1..20: mol_type = other DNA
atggaatactatatggcaat

SEQ ID NO: 72001 - DNA, 20 bp, synthetic construct
  misc_feature 1..20: note = Description of Artificial Sequence: Synthetic oligonucleotide
  misc_feature 1..20: note = Target: SCN10A; (+) strand; PAM type: YTN; PAM sequence: TTA
  source 1..20: mol_type = other DNA
tggaatactatatggcaata

SEQ ID NO: 72002 - DNA, 20 bp, synthetic construct
  misc_feature 1..20: note = Description of Artificial Sequence: Synthetic oligonucleotide
  misc_feature 1..20: note = Target: SCN10A; (+) strand; PAM type: YTN; PAM sequence: CTA
  source 1..20: mol_type = other DNA
tatggcaataaaaaatgaat

SEQ ID NO: 72003 - DNA, 20 bp, synthetic construct
  misc_feature 1..20: note = Description of Artificial Sequence: Synthetic oligonucleotide
  misc_feature 1..20: note = Target: SCN10A; (+) strand; PAM type: YTN; PAM sequence: TTA
  source 1..20: mol_type = other DNA
ggtctacatgtatccatttg

SEQ ID NO: 72004 - DNA, 20 bp, synthetic construct
  misc_feature 1..20: note = Description of Artificial Sequence: Synthetic oligonucleotide
  misc_feature 1..20: note = Target: SCN10A; (+) strand; PAM type: YTN; PAM sequence: CTA
  source 1..20: mol_type = other DNA
catgtatccatttgggcaaa

SEQ ID NO: 72005 - DNA, 20 bp, synthetic construct
  misc_feature 1..20: note = Description of Artificial Sequence: Synthetic oligonucleotide
  misc_feature 1..20: note = Target: SCN10A; (+) strand; PAM type: YTN; PAM sequence: TTT
  source 1..20: mol_type = other DNA
gggcaaatcccaaaaacata

SEQ ID NO: 72006 - DNA, 20 bp, synthetic construct
  misc_feature 1..20: note = Description of Artificial Sequence: Synthetic oligonucleotide
  misc_feature 1..20: note = Target: SCN10A; (+) strand; PAM type: YTN; PAM sequence: TTG
  source 1..20: mol_type = other DNA
ggcaaatcccaaaaacataa

SEQ ID NO: 72007 - DNA, 20 bp, synthetic construct
  misc_feature 1..20: note = Description of Artificial Sequence: Synthetic oligonucleotide
  misc_feature 1..20: note = Target: SCN10A; (+) strand; PAM type: YTN; PAM sequence: TTT
  source 1..20: mol_type = other DNA
taaaacatcagataaagcac

SEQ ID NO: 72008 - DNA, 20 bp, synthetic construct
  misc_feature 1..20: note = Description of Artificial Sequence: Synthetic oligonucleotide
  misc_feature 1..20: note = Target: SCN10A; (+) strand; PAM type: YTN; PAM sequence: TTT
  source 1..20: mol_type = other DNA
aaaacatcagataaagcaca

SEQ ID NO: 72009 - DNA, 20 bp, synthetic construct
  misc_feature 1..20: note = Description of Artificial Sequence: Synthetic oligonucleotide
  misc_feature 1..20: note = Target: SCN10A; (+) strand; PAM type: YTN; PAM sequence: TTA
  source 1..20: mol_type = other DNA
aaacatcagataaagcacac

SEQ ID NO: 72010 - DNA, 20 bp, synthetic construct
  misc_feature 1..20: note = Description of Artificial Sequence: Synthetic oligonucleotide
  misc_feature 1..20: note = Target: SCN10A; (+) strand; PAM type: YTN; PAM sequence: TTC
  source 1..20: mol_type = other DNA
cataaatttgaaaagataca

SEQ ID NO: 72011 - DNA, 20 bp, synthetic construct
  misc_feature 1..20: note = Description of Artificial Sequence: Synthetic oligonucleotide
  misc_feature 1..20: note = Target: SCN10A; (+) strand; PAM type: YTN; PAM sequence: TTT
  source 1..20: mol_type = other DNA
gaaaagatacaaatcaatac

SEQ ID NO: 72012 - DNA, 20 bp, synthetic construct
  misc_feature 1..20: note = Description of Artificial Sequence: Synthetic oligonucleotide
  misc_feature 1..20: note = Target: SCN10A; (+) strand; PAM type: YTN; PAM sequence: TTG
  source 1..20: mol_type = other DNA
aaaagatacaaatcaatact

SEQ ID NO: 72013 - DNA, 20 bp, synthetic construct
  misc_feature 1..20: note = Description of Artificial Sequence: Synthetic oligonucleotide
  misc_feature 1..20: note = Target: SCN10A; (+) strand; PAM type: YTN; PAM sequence: CTT
  source 1..20: mol_type = other DNA
tatgcatgcagtgttaaaca

SEQ ID NO: 72014 - DNA, 20 bp, synthetic construct
  misc_feature 1..20: note = Description of Artificial Sequence: Synthetic oligonucleotide
  misc_feature 1..20: note = Target: SCN10A; (+) strand; PAM type: YTN; PAM sequence: TTT
  source 1..20: mol_type = other DNA
atgcatgcagtgttaaacac

SEQ ID NO: 72015 - DNA, 20 bp, synthetic construct
  misc_feature 1..20: note = Description of Artificial Sequence: Synthetic oligonucleotide
  misc_feature 1..20: note = Target: SCN10A; (+) strand; PAM type: YTN; PAM sequence: TTA
  source 1..20: mol_type = other DNA
tgcatgcagtgttaaacacc

SEQ ID NO: 72016 - DNA, 20 bp, synthetic construct
  misc_feature 1..20: note = Description of Artificial Sequence: Synthetic oligonucleotide
  misc_feature 1..20: note = Target: SCN10A; (+) strand; PAM type: YTN; PAM sequence: TTA
  source 1..20: mol_type = other DNA
aacacccacttccccgtttg

SEQ ID NO: 72017 - DNA, 20 bp, synthetic construct
  misc_feature 1..20: note = Description of Artificial Sequence: Synthetic oligonucleotide
  misc_feature 1..20: note = Target: SCN10A; (+) strand; PAM type: YTN; PAM sequence: CTT
  source 1..20: mol_type = other DNA
ccccgtttgcagtagattca

SEQ ID NO: 72018 - DNA, 20 bp, synthetic construct
  misc_feature 1..20: note = Description of Artificial Sequence: Synthetic oligonucleotide
  misc_feature 1..20: note = Target: SCN10A; (+) strand; PAM type: YTN; PAM sequence: TTC
  source 1..20: mol_type = other DNA
cccgtttgcagtagattcag

SEQ ID NO: 72019 - DNA, 20 bp, synthetic construct
  misc_feature 1..20: note = Description of Artificial Sequence: Synthetic oligonucleotide
  misc_feature 1..20: note = Target: SCN10A; (+) strand; PAM type: YTN; PAM sequence: TTT
  source 1..20: mol_type = other DNA
gcagtagattcagcttcatt

SEQ ID NO: 72020 - DNA, 20 bp, synthetic construct
  misc_feature 1..20: note = Description of Artificial Sequence: Synthetic oligonucleotide
  misc_feature 1..20: note = Target: SCN10A; (+) strand; PAM type: YTN; PAM sequence: TTG
  source 1..20: mol_type = other DNA
cagtagattcagcttcattt

SEQ ID NO: 72021 - DNA, 20 bp, synthetic construct
  misc_feature 1..20: note = Description of Artificial Sequence: Synthetic oligonucleotide
  misc_feature 1..20: note = Target: SCN10A; (+) strand; PAM type: YTN; PAM sequence: TTC
  source 1..20: mol_type = other DNA
agcttcatttcacatgttct

SEQ ID NO: 72022 - DNA, 20 bp, synthetic construct
  misc_feature 1..20: note = Description of Artificial Sequence: Synthetic oligonucleotide
  misc_feature 1..20: note = Target: SCN10A; (+) strand; PAM type: YTN; PAM sequence: CTT
  source 1..20: mol_type = other DNA
catttcacatgttctttgcc

SEQ ID NO: 72023 - DNA, 20 bp, synthetic construct
  misc_feature 1..20: note = Description of Artificial Sequence: Synthetic oligonucleotide
  misc_feature 1..20: note = Target: SCN10A; (+) strand; PAM type: YTN; PAM sequence: TTC
  source 1..20: mol_type = other DNA
atttcacatgttctttgcca

SEQ ID NO: 72024 - DNA, 20 bp, synthetic construct
  misc_feature 1..20: note = Description of Artificial Sequence: Synthetic oligonucleotide
  misc_feature 1..20: note = Target: SCN10A; (+) strand; PAM type: YTN; PAM sequence: TTT
  source 1..20: mol_type = other DNA
cacatgttctttgccaggtg

SEQ ID NO: 72025 - DNA, 20 bp, synthetic construct
  misc_feature 1..20: note = Description of Artificial Sequence: Synthetic oligonucleotide
  misc_feature 1..20: note = Target: SCN10A; (+) strand; PAM type: YTN; PAM sequence: TTC
  source 1..20: mol_type = other DNA
acatgttctttgccaggtga

SEQ ID NO: 72026 - DNA, 20 bp, synthetic construct
  misc_feature 1..20: note = Description of Artificial Sequence: Synthetic oligonucleotide
  misc_feature 1..20: note = Target: SCN10A; (+) strand; PAM type: YTN; PAM sequence: TTC
  source 1..20: mol_type = other DNA
tttgccaggtgagaaaacat

SEQ ID NO: 72027 - DNA, 20 bp, synthetic construct
  misc_feature 1..20: note = Description of Artificial Sequence: Synthetic oligonucleotide
  misc_feature 1..20: note = Target: SCN10A; (+) strand; PAM type: YTN; PAM sequence: CTT
  source 1..20: mol_type = other DNA
tgccaggtgagaaaacattt

SEQ ID NO: 72028 - DNA, 20 bp, synthetic construct
  misc_feature 1..20: note = Description of Artificial Sequence: Synthetic oligonucleotide
  misc_feature 1..20: note = Target: SCN10A; (+) strand; PAM type: YTN; PAM sequence: TTT
  source 1..20: mol_type = other DNA
gccaggtgagaaaacattta

SEQ ID NO: 72029 - DNA, 20 bp, synthetic construct
  misc_feature 1..20: note = Description of Artificial Sequence: Synthetic oligonucleotide
  misc_feature 1..20: note = Target: SCN10A; (+) strand; PAM type: YTN; PAM sequence: TTG
  source 1..20: mol_type = other DNA
ccaggtgagaaaacatttat

SEQ ID NO: 72030 - DNA, 20 bp, synthetic construct
  misc_feature 1..20: note = Description of Artificial Sequence: Synthetic oligonucleotide
  misc_feature 1..20: note = Target: SCN10A; (+) strand; PAM type: YTN; PAM sequence: TTT
  source 1..20: mol_type = other DNA
atcttctctacaaccaaatt

SEQ ID NO: 72031 - DNA, 20 bp, synthetic construct
  misc_feature 1..20: note = Description of Artificial Sequence: Synthetic oligonucleotide
  misc_feature 1..20: note = Target: SCN10A; (+) strand; PAM type: YTN; PAM sequence: TTA
  source 1..20: mol_type = other DNA
tcttctctacaaccaaattg

SEQ ID NO: 72032 - DNA, 20 bp, synthetic construct
  misc_feature 1..20: note = Description of Artificial Sequence: Synthetic oligonucleotide
  misc_feature 1..20: note = Target: SCN10A; (+) strand; PAM type: YTN; PAM sequence: CTT
  source 1..20: mol_type = other DNA
ctctacaaccaaattgctat

SEQ ID NO: 72033 - DNA, 20 bp, synthetic construct
  misc_feature 1..20: note = Description of Artificial Sequence: Synthetic oligonucleotide
  misc_feature 1..20: note = Target: SCN10A; (+) strand; PAM type: YTN; PAM sequence: TTC
  source 1..20: mol_type = other DNA
tctacaaccaaattgctata

SEQ ID NO: 72034 - DNA, 20 bp, synthetic construct
  misc_feature 1..20: note = Description of Artificial Sequence: Synthetic oligonucleotide
  misc_feature 1..20: note = Target: SCN10A; (+) strand; PAM type: YTN; PAM sequence: CTC
  source 1..20: mol_type = other DNA
tacaaccaaattgctataat

SEQ ID NO: 72035 - DNA, 20 bp, synthetic construct
  misc_feature 1..20: note = Description of Artificial Sequence: Synthetic oligonucleotide
  misc_feature 1..20: note = Target: SCN10A; (+) strand; PAM type: YTN; PAM sequence: CTA
  source 1..20: mol_type = other DNA
caaccaaattgctataattt

SEQ ID NO: 72036 - DNA, 20 bp, synthetic construct
  misc_feature 1..20: note = Description of Artificial Sequence: Synthetic oligonucleotide
  misc_feature 1..20: note = Target: SCN10A; (+) strand; PAM type: YTN; PAM sequence: TTG
  source 1..20: mol_type = other DNA
ctataatttgtcaaaggttt

SEQ ID NO: 72037 - DNA, 20 bp, synthetic construct
  misc_feature 1..20: note = Description of Artificial Sequence: Synthetic oligonucleotide
  misc_feature 1..20: note = Target: SCN10A; (+) strand; PAM type: YTN; PAM sequence: CTA
  source 1..20: mol_type = other DNA
taatttgtcaaaggttttcc

SEQ ID NO: 72038 - DNA, 20 bp, synthetic construct
  misc_feature 1..20: note = Description of Artificial Sequence: Synthetic oligonucleotide
  misc_feature 1..20: note = Target: SCN10A; (+) strand; PAM type: YTN; PAM sequence: TTT
  source 1..20: mol_type = other DNA
gtcaaaggttttccagaata

SEQ ID NO: 72039 - DNA, 20 bp, synthetic construct
  misc_feature 1..20: note = Description of Artificial Sequence: Synthetic oligonucleotide
  misc_feature 1..20: note = Target: SCN10A; (+) strand; PAM type: YTN; PAM sequence: TTG
  source 1..20: mol_type = other DNA
tcaaaggttttccagaatat

SEQ ID NO: 72040 - DNA, 20 bp, synthetic construct
  misc_feature 1..20: note = Description of Artificial Sequence: Synthetic oligonucleotide
  misc_feature 1..20: note = Target: SCN10A; (+) strand; PAM type: YTN; PAM sequence: TTT
  source 1..20: mol_type = other DNA
tccagaatattgttatgctt

SEQ ID NO: 72041 - DNA, 20 bp, synthetic construct
  misc_feature 1..20: note = Description of Artificial Sequence: Synthetic oligonucleotide
  misc_feature 1..20: note = Target: SCN10A; (+) strand; PAM type: YTN; PAM sequence: TTT
  source 1..20: mol_type = other DNA
ccagaatattgttatgctta

SEQ ID NO: 72042 - DNA, 20 bp, synthetic construct
  misc_feature 1..20: note = Description of Artificial Sequence: Synthetic oligonucleotide
  misc_feature 1..20: note = Target: SCN10A; (+) strand; PAM type: YTN; PAM sequence: TTC
  source 1..20: mol_type = other DNA
cagaatattgttatgcttag

SEQ ID NO: 72043 - DNA, 20 bp, synthetic construct
  misc_feature 1..20: note = Description of Artificial Sequence: Synthetic oligonucleotide
  misc_feature 1..20: note = Target: SCN10A; (+) strand; PAM type: YTN; PAM sequence: TTG
  source 1..20: mol_type = other DNA
ttatgcttagaggtgagtgt

SEQ ID NO: 72044 - DNA, 20 bp, synthetic construct
  misc_feature 1..20: note = Description of Artificial Sequence: Synthetic oligonucleotide
  misc_feature 1..20: note = Target: SCN10A; (+) strand; PAM type: YTN; PAM sequence: TTA
  source 1..20: mol_type = other DNA
tgcttagaggtgagtgtcct

SEQ ID NO: 72045 - DNA, 20 bp, synthetic construct
  misc_feature 1..20: note = Description of Artificial Sequence: Synthetic oligonucleotide
  misc_feature 1..20: note = Target: SCN10A; (+) strand; PAM type: YTN; PAM sequence: CTT
  source 1..20: mol_type = other DNA
agaggtgagtgtcctagggt

SEQ ID NO: 72046 - DNA, 20 bp, synthetic construct
  misc_feature 1..20: note = Description of Artificial Sequence: Synthetic oligonucleotide
  misc_feature 1..20: note = Target: SCN10A; (+) strand; PAM type: YTN; PAM sequence: TTA
  source 1..20: mol_type = other DNA
gaggtgagtgtcctagggtc

SEQ ID NO: 72047 - DNA, 20 bp, synthetic construct
  misc_feature 1..20: note = Description of Artificial Sequence: Synthetic oligonucleotide
  misc_feature 1..20: note = Target: SCN10A; (+) strand; PAM type: YTN; PAM sequence: CTA
  source 1..20: mol_type = other DNA
gggtcatcaaagagcccctt

SEQ ID NO: 72048 - DNA, 20 bp, synthetic construct
  misc_feature 1..20: note = Description of Artificial Sequence: Synthetic oligonucleotide
  misc_feature 1..20: note = Target: SCN10A; (+) strand; PAM type: YTN; PAM sequence: CTT
  source 1..20: mol_type = other DNA
caatgattctctgaaaccag

SEQ ID NO: 72049 - DNA, 20 bp, synthetic construct
  misc_feature 1..20: note = Description of Artificial Sequence: Synthetic oligonucleotide
  misc_feature 1..20: note = Target: SCN10A; (+) strand; PAM type: YTN; PAM sequence: TTC
  source 1..20: mol_type = other DNA
aatgattctctgaaaccagg

SEQ ID NO: 72050 - DNA, 20 bp, synthetic construct
  misc_feature 1..20: note = Description of Artificial Sequence: Synthetic oligonucleotide
  misc_feature 1..20: note = Target: SCN10A; (+) strand; PAM type: YTN; PAM sequence: TTC
  source 1..20: mol_type = other DNA
tctgaaaccagggcatgggg

SEQ ID NO: 72051 - DNA, 20 bp, synthetic construct
  misc_feature 1..20: note = Description of Artificial Sequence: Synthetic oligonucleotide
  misc_feature 1..20: note = Target: SCN10A; (+) strand; PAM type: YTN; PAM sequence: CTC
  source 1..20: mol_type = other DNA
tgaaaccagggcatggggag

SEQ ID NO: 72052 - DNA, 20 bp, synthetic construct
  misc_feature 1..20: note = Description of Artificial Sequence: Synthetic oligonucleotide
  misc_feature 1..20: note = Target: SCN10A; (+) strand; PAM type: YTN; PAM sequence: CTG
  source 1..20: mol_type = other DNA
aaaccagggcatggggagag

SEQ ID NO: 72053 - DNA, 20 bp, synthetic construct
  misc_feature 1..20: note = Description of Artificial Sequence: Synthetic oligonucleotide
  misc_feature 1..20: note = Target: SCN10A; (+) strand; PAM type: YTN; PAM sequence: TTC
  source 1..20: mol_type = other DNA
tagtcttgcccttcttaaca

SEQ ID NO: 72054 - DNA, 20 bp, synthetic construct
  misc_feature 1..20: note = Description of Artificial Sequence: Synthetic oligonucleotide
  misc_feature 1..20: note = Target: SCN10A; (+) strand; PAM type: YTN; PAM sequence: CTA
  source 1..20: mol_type = other DNA
gtcttgcccttcttaacaat

SEQ ID NO: 72055 - DNA, 20 bp, synthetic construct
  misc_feature 1..20: note = Description of Artificial Sequence: Synthetic oligonucleotide
  misc_feature 1..20: note = Target: SCN10A; (+) strand; PAM type: YTN; PAM sequence: CTT
  source 1..20: mol_type = other DNA
gcccttcttaacaatttttg

SEQ ID NO: 72056 - DNA, 20 bp, synthetic construct
  misc_feature 1..20: note = Description of Artificial Sequence: Synthetic oligonucleotide
  misc_feature 1..20: note = Target: SCN10A; (+) strand; PAM type: YTN; PAM sequence: TTG
  source 1..20: mol_type = other DNA
cccttcttaacaatttttga

SEQ ID NO: 72057 - DNA, 20 bp, synthetic construct
  misc_feature 1..20: note = Description of Artificial Sequence: Synthetic oligonucleotide
  misc_feature 1..20: note = Target: SCN10A; (+) strand; PAM type: YTN; PAM sequence: CTT
  source 1..20: mol_type = other DNA
cttaacaatttttgaccccc

SEQ ID NO: 72058 - DNA, 20 bp, synthetic construct
  misc_feature 1..20: note = Description of Artificial Sequence: Synthetic oligonucleotide
  misc_feature 1..20: note = Target: SCN10A; (+) strand; PAM type: YTN; PAM sequence: TTC
  source 1..20: mol_type = other DNA
ttaacaatttttgaccccct

SEQ ID NO: 72059 - DNA, 20 bp, synthetic construct
  misc_feature 1..20: note = Description of Artificial Sequence: Synthetic oligonucleotide
  misc_feature 1..20: note = Target: SCN10A; (+) strand; PAM type: YTN; PAM sequence: CTT
  source 1..20: mol_type = other DNA
aacaatttttgaccccctgc

SEQ ID NO: 72060 - DNA, 20 bp, synthetic construct
  misc_feature 1..20: note = Description of Artificial Sequence: Synthetic oligonucleotide
  misc_feature 1..20: note = Target: SCN10A; (+) strand; PAM type: YTN; PAM sequence: TTA
  source 1..20: mol_type = other DNA
acaatttttgaccccctgct

SEQ ID NO: 72061 - DNA, 20 bp, synthetic construct
  misc_feature 1..20: note = Description of Artificial Sequence: Synthetic oligonucleotide
  misc_feature 1..20: note = Target: SCN10A; (+) strand; PAM type: YTN; PAM sequence: TTT
  source 1..20: mol_type = other DNA
ttgaccccctgctctcttta

SEQ ID NO: 72062 - DNA, 20 bp, synthetic construct
  misc_feature 1..20: note = Description of Artificial Sequence: Synthetic oligonucleotide
  misc_feature 1..20: note = Target: SCN10A; (+) strand; PAM type: YTN; PAM sequence: TTT
  source 1..20: mol_type = other DNA
tgaccccctgctctctttac

SEQ ID NO: 72063 - DNA, 20 bp, synthetic construct
  misc_feature 1..20: note = Description of Artificial Sequence: Synthetic oligonucleotide
  misc_feature 1..20: note = Target: SCN10A; (+) strand; PAM type: YTN; PAM sequence: TTT
  source 1..20: mol_type = other DNA
gaccccctgctctctttacc

SEQ ID NO: 72064 - DNA, 20 bp, synthetic construct
  misc_feature 1..20: note = Description of Artificial Sequence: Synthetic oligonucleotide
  misc_feature 1..20: note = Target: SCN10A; (+) strand; PAM type: YTN; PAM sequence: TTG
  source 1..20: mol_type = other DNA
accccctgctctctttacct

SEQ ID NO: 72065 - DNA, 20 bp, synthetic construct
  misc_feature 1..20: note = Description of Artificial Sequence: Synthetic oligonucleotide
  misc_feature 1..20: note = Target: SCN10A; (+) strand; PAM type: YTN; PAM sequence: CTG
  source 1..20: mol_type = other DNA
ctctctttaccttctggtgc

SEQ ID NO: 72066 - DNA, 20 bp, synthetic construct
  misc_feature 1..20: note = Description of Artificial Sequence: Synthetic oligonucleotide
  misc_feature 1..20: note = Target: SCN10A; (+) strand; PAM type: YTN; PAM sequence: CTC
  source 1..20: mol_type = other DNA
tctttaccttctggtgccca

SEQ ID NO: 72067 - DNA, 20 bp, synthetic construct
  misc_feature 1..20: note = Description of Artificial Sequence: Synthetic oligonucleotide
  misc_feature 1..20: note = Target: SCN10A; (+) strand; PAM type: YTN; PAM sequence: CTC
  source 1..20: mol_type = other DNA
tttaccttctggtgcccaat

SEQ ID NO: 72068 - DNA, 20 bp, synthetic construct
  misc_feature 1..20: note = Description of Artificial Sequence: Synthetic oligonucleotide
  misc_feature 1..20: note = Target: SCN10A; (+) strand; PAM type: YTN; PAM sequence: CTT
  source 1..20: mol_type = other DNA
taccttctggtgcccaatct

SEQ ID NO: 72069 - DNA, 20 bp, synthetic construct
  misc_feature 1..20: note = Description of Artificial Sequence: Synthetic oligonucleotide
  misc_feature 1..20: note = Target: SCN10A; (+) strand; PAM type: YTN; PAM sequence: TTT
  source 1..20: mol_type = other DNA
accttctggtgcccaatctg

SEQ ID NO: 72070 - DNA, 20 bp, synthetic construct
  misc_feature 1..20: note = Description of Artificial Sequence: Synthetic oligonucleotide
  misc_feature 1..20: note = Target: SCN10A; (+) strand; PAM type: YTN; PAM sequence: TTA
  source 1..20: mol_type = other DNA
ccttctggtgcccaatctga

SEQ ID NO: 72071 - DNA, 20 bp, synthetic construct
  misc_feature 1..20: note = Description of Artificial Sequence: Synthetic oligonucleotide
  misc_feature 1..20: note = Target: SCN10A; (+) strand; PAM type: YTN; PAM sequence: CTT
  source 1..20: mol_type = other DNA
ctggtgcccaatctgaggaa

SEQ ID NO: 72072 - DNA, 20 bp, synthetic construct
  misc_feature 1..20: note = Description of Artificial Sequence: Synthetic oligonucleotide
  misc_feature 1..20: note = Target: SCN10A; (+) strand; PAM type: YTN; PAM sequence: TTC
  source 1..20: mol_type = other DNA
tggtgcccaatctgaggaag

SEQ ID NO: 72073 - DNA, 20 bp, synthetic construct
  misc_feature 1..20: note = Description of Artificial Sequence: Synthetic oligonucleotide
  misc_feature 1..20: note = Target: SCN10A; (+) strand; PAM type: YTN; PAM sequence: CTG
  source 1..20: mol_type = other DNA
gtgcccaatctgaggaagaa

SEQ ID NO: 72074 - DNA, 20 bp, synthetic construct
  misc_feature 1..20: note = Description of Artificial Sequence: Synthetic oligonucleotide
  misc_feature 1..20: note = Target: SCN10A; (+) strand; PAM type: YTN; PAM sequence: CTG
  source 1..20: mol_type = other DNA
aggaagaacctctagtttct

SEQ ID NO: 72075 - DNA, 20 bp, synthetic construct
  misc_feature 1..20: note = Description of Artificial Sequence: Synthetic oligonucleotide
  misc_feature 1..20: note = Target: SCN10A; (+) strand; PAM type: YTN; PAM sequence: CTC
  source 1..20: mol_type = other DNA
tagtttcttcccaagcaaaa

SEQ ID NO: 72076 - DNA, 20 bp, synthetic construct
  misc_feature 1..20: note = Description of Artificial Sequence: Synthetic oligonucleotide
  misc_feature 1..20: note = Target: SCN10A; (+) strand; PAM type: YTN; PAM sequence: CTA
  source 1..20: mol_type = other DNA
gtttcttcccaagcaaaaga

SEQ ID NO: 72077 - DNA, 20 bp, synthetic construct
  misc_feature 1..20: note = Description of Artificial Sequence: Synthetic oligonucleotide
  misc_feature 1..20: note = Target: SCN10A; (+) strand; PAM type: YTN; PAM sequence: TTT
  source 1..20: mol_type = other DNA
cttcccaagcaaaagagggg

SEQ ID NO: 72078 - DNA, 20 bp, synthetic construct
  misc_feature 1..20: note = Description of Artificial Sequence: Synthetic oligonucleotide
  misc_feature 1..20: note = Target: SCN10A; (+) strand; PAM type: YTN; PAM sequence: TTC
  source 1..20: mol_type = other DNA
ttcccaagcaaaagagggga

SEQ ID NO: 72079 - DNA, 20 bp, synthetic construct
  misc_feature 1..20: note = Description of Artificial Sequence: Synthetic oligonucleotide
  misc_feature 1..20: note = Target: SCN10A; (+) strand; PAM type: YTN; PAM sequence: CTT
  source 1..20: mol_type = other DNA
cccaagcaaaagaggggatt

SEQ ID NO: 72080 - DNA, 20 bp, synthetic construct
  misc_feature 1..20: note = Description of Artificial Sequence: Synthetic oligonucleotide
  misc_feature 1..20: note = Target: SCN10A; (+) strand; PAM type: YTN; PAM sequence: TTC
  source 1..20: mol_type = other DNA
ccaagcaaaagaggggatta

SEQ ID NO: 72081 - DNA, 20 bp, synthetic construct
  misc_feature 1..20: note = Description of Artificial Sequence: Synthetic oligonucleotide
  misc_feature 1..20: note = Target: SCN10A; (+) strand; PAM type: YTN; PAM sequence: TTA
  source 1..20: mol_type = other DNA
gaaaatggaatatctatctt

SEQ ID NO: 72082 - DNA, 20 bp, synthetic construct
  misc_feature 1..20: note = Description of Artificial Sequence: Synthetic oligonucleotide
  misc_feature 1..20: note = Target: SCN10A; (+) strand; PAM type: YTN; PAM sequence: CTA
  source 1..20: mol_type = other DNA
tctttatctttccacaagca

SEQ ID NO: 72083 - DNA, 20 bp, synthetic construct
  misc_feature 1..20: note = Description of Artificial Sequence: Synthetic oligonucleotide
  misc_feature 1..20: note = Target: SCN10A; (+) strand; PAM type: YTN; PAM sequence: CTT
  source 1..20: mol_type = other DNA
tatctttccacaagcagaca

SEQ ID NO: 72084 - DNA, 20 bp, synthetic construct
  misc_feature 1..20: note = Description of Artificial Sequence: Synthetic oligonucleotide
  misc_feature 1..20: note = Target: SCN10A; (+) strand; PAM type: YTN; PAM sequence: TTT
  source 1..20: mol_type = other DNA
atctttccacaagcagacag

SEQ ID NO: 72085 - DNA, 20 bp, synthetic construct
  misc_feature 1..20: note = Description of Artificial Sequence: Synthetic oligonucleotide
  misc_feature 1..20: note = Target: SCN10A; (+) strand; PAM type: YTN; PAM sequence: TTA
  source 1..20: mol_type = other DNA
tctttccacaagcagacaga

SEQ ID NO: 72086 - DNA, 20 bp, synthetic construct
  misc_feature 1..20: note = Description of Artificial Sequence: Synthetic oligonucleotide
  misc_feature 1..20: note = Target: SCN10A; (+) strand; PAM type: YTN; PAM sequence: CTT
  source 1..20: mol_type = other DNA
tccacaagcagacagatagg

SEQ ID NO: 72087 - DNA, 20 bp, synthetic construct
  misc_feature 1..20: note = Description of Artificial Sequence: Synthetic oligonucleotide
  misc_feature 1..20: note = Target: SCN10A; (+) strand; PAM type: YTN; PAM sequence: TTT
  source 1..20: mol_type = other DNA
ccacaagcagacagataggc

SEQ ID NO: 72088 - DNA, 20 bp, synthetic construct
  misc_feature 1..20: note = Description of Artificial Sequence: Synthetic oligonucleotide
  misc_feature 1..20: note = Target: SCN10A; (+) strand; PAM type: YTN; PAM sequence: TTC
  source 1..20: mol_type = other DNA
cacaagcagacagataggca

SEQ ID NO: 72089 - DNA, 20 bp, synthetic construct
  misc_feature 1..20: note = Description of Artificial Sequence: Synthetic oligonucleotide
  misc_feature 1..20: note = Target: SCN10A; (+) strand; PAM type: YTN; PAM sequence: CTA
  source 1..20: mol_type = other DNA
ccattatcagcaggtaattg

SEQ ID NO: 72090 - DNA, 20 bp, synthetic construct
  misc_feature 1..20: note = Description of Artificial Sequence: Synthetic oligonucleotide
  misc_feature 1..20: note = Target: SCN10A; (+) strand; PAM type: YTN; PAM sequence: TTA
  source 1..20: mol_type = other DNA
tcagcaggtaattgtgcaaa

SEQ ID NO: 72091 - DNA, 20 bp, synthetic construct
  misc_feature 1..20: note = Description of Artificial Sequence: Synthetic oligonucleotide
  misc_feature 1..20: note = Target: SCN10A; (+) strand; PAM type: YTN; PAM sequence: TTG
  source 1..20: mol_type = other DNA
tgcaaagctaatgtttcagc

SEQ ID NO: 72092 - DNA, 20 bp, synthetic construct
  misc_feature 1..20: note = Description of Artificial Sequence: Synthetic oligonucleotide
  misc_feature 1..20: note = Target: SCN10A; (+) strand; PAM type: YTN; PAM sequence: CTA
  source 1..20: mol_type = other DNA
atgtttcagcaaggaataat

SEQ ID NO: 72093 - DNA, 20 bp, synthetic construct
  misc_feature 1..20: note = Description of Artificial Sequence: Synthetic oligonucleotide
  misc_feature 1..20: note = Target: SCN10A; (+) strand; PAM type: YTN; PAM sequence: TTT
  source 1..20: mol_type = other DNA
cagcaaggaataatggaagg

SEQ ID NO: 72094 - DNA, 20 bp, synthetic construct
  misc_feature 1..20: note = Description of Artificial Sequence: Synthetic oligonucleotide
  misc_feature 1..20: note = Target: SCN10A; (+) strand; PAM type: YTN; PAM sequence: TTC
  source 1..20: mol_type = other DNA
agcaaggaataatggaaggg

SEQ ID NO: 72095 - DNA, 20 bp, synthetic construct
  misc_feature 1..20: note = Description of Artificial Sequence: Synthetic oligonucleotide
  misc_feature 1..20: note = Target: SCN10A; (+) strand; PAM type: YTN; PAM sequence: TTG
  source 1..20: mol_type = other DNA
tgttaagaacatggcaataa

SEQ ID NO: 72096 - DNA, 20 bp, synthetic construct
  misc_feature 1..20: note = Description of Artificial Sequence: Synthetic oligonucleotide
  misc_feature 1..20: note = Target: SCN10A; (+) strand; PAM type: YTN; PAM sequence: TTA
  source 1..20: mol_type = other DNA
agaacatggcaataagattg

SEQ ID NO: 72097 - DNA, 20 bp, synthetic construct
  misc_feature 1..20: note = Description of Artificial Sequence: Synthetic oligonucleotide
  misc_feature 1..20: note = Target: SCN10A; (+) strand; PAM type: YTN; PAM sequence: TTG
  source 1..20: mol_type = other DNA
gtttctgattcctcactggc

SEQ ID NO: 72098 - DNA, 20 bp, synthetic construct
  misc_feature 1..20: note = Description of Artificial Sequence: Synthetic oligonucleotide
  misc_feature 1..20: note = Target: SCN10A; (+) strand; PAM type: YTN; PAM sequence: TTT
  source 1..20: mol_type = other DNA
ctgattcctcactggctaca

SEQ ID NO: 72099 - DNA, 20 bp, synthetic construct
  misc_feature 1..20: note = Description of Artificial Sequence: Synthetic oligonucleotide
  misc_feature 1..20: note = Target: SCN10A; (+) strand; PAM type: YTN; PAM sequence: TTC
  source 1..20: mol_type = other DNA
tgattcctcactggctacaa

SEQ ID NO: 72100 - DNA, 20 bp, synthetic construct
  misc_feature 1..20: note = Description of Artificial Sequence: Synthetic oligonucleotide
  misc_feature 1..20: note = Target: SCN10A; (+) strand; PAM type: YTN; PAM sequence: CTG
  source 1..20: mol_type = other DNA
attcctcactggctacaatt

SEQ ID NO: 72101 - DNA, 20 bp, synthetic construct
  misc_feature 1..20: note = Description of Artificial Sequence: Synthetic oligonucleotide
  misc_feature 1..20: note = Target: SCN10A; (+) strand; PAM type: YTN; PAM sequence: TTC
  source 1..20: mol_type = other DNA
ctcactggctacaatttaat

SEQ ID NO: 72102 - DNA, 20 bp, synthetic construct
  misc_feature 1..20: note = Description of Artificial Sequence: Synthetic oligonucleotide
  misc_feature 1..20: note = Target: SCN10A; (+) strand; PAM type: YTN; PAM sequence: CTC
  source 1..20: mol_type = other DNA
actggctacaatttaatgct

SEQ ID NO: 72103 - DNA, 20 bp, synthetic construct
  misc_feature 1..20: note = Description of Artificial Sequence: Synthetic oligonucleotide
  misc_feature 1..20: note = Target: SCN10A; (+) strand; PAM type: YTN; PAM sequence: CTG
  source 1..20: mol_type = other DNA
gctacaatttaatgcttttt

SEQ ID NO: 72104 - DNA, 20 bp, synthetic construct
  misc_feature 1..20: note = Description of Artificial Sequence: Synthetic oligonucleotide
  misc_feature 1..20: note = Target: SCN10A; (+) strand; PAM type: YTN; PAM sequence: CTA
  source 1..20: mol_type = other DNA
caatttaatgctttttcaaa

SEQ ID NO: 72105 - DNA, 20 bp, synthetic construct
  misc_feature 1..20: note = Description of Artificial Sequence: Synthetic oligonucleotide
  misc_feature 1..20: note = Target: SCN10A; (+) strand; PAM type: YTN; PAM sequence: TTT
  source 1..20: mol_type = other DNA
aatgctttttcaaaagtata

SEQ ID NO: 72106 - DNA, 20 bp, synthetic construct
  misc_feature 1..20: note = Description of Artificial Sequence: Synthetic oligonucleotide
  misc_feature 1..20: note = Target: SCN10A; (+) strand; PAM type: YTN; PAM sequence: TTA
  source 1..20: mol_type = other DNA
atgctttttcaaaagtatac

SEQ ID NO: 72107 - DNA, 20 bp, synthetic construct
  misc_feature 1..20: note = Description of Artificial Sequence: Synthetic oligonucleotide
  misc_feature 1..20: note = Target: SCN10A; (+) strand; PAM type: YTN; PAM sequence: CTT
  source 1..20: mol_type = other DNA
tttcaaaagtatacagcatg

SEQ ID NO: 72108 - DNA, 20 bp, synthetic construct
  misc_feature 1..20: note = Description of Artificial Sequence: Synthetic oligonucleotide
  misc_feature 1..20: note = Target: SCN10A; (+) strand; PAM type: YTN; PAM sequence: TTT
  source 1..20: mol_type = other DNA
ttcaaaagtatacagcatga

SEQ ID NO: 72109 - DNA, 20 bp, synthetic construct
  misc_feature 1..20: note = Description of Artificial Sequence: Synthetic oligonucleotide
  misc_feature 1..20: note = Target: SCN10A; (+) strand; PAM type: YTN; PAM sequence: TTT
  source 1..20: mol_type = other DNA
tcaaaagtatacagcatgat

SEQ ID NO: 72110 - DNA, 20 bp, synthetic construct
  misc_feature 1..20: note = Description of Artificial Sequence: Synthetic oligonucleotide
  misc_feature 1..20: note = Target: SCN10A; (+) strand; PAM type: YTN; PAM sequence: TTT
  source 1..20: mol_type = other DNA
caaaagtatacagcatgatc

SEQ ID NO: 72111 - DNA, 20 bp, synthetic construct
  misc_feature 1..20: note = Description of Artificial Sequence: Synthetic oligonucleotide
  misc_feature 1..20: note = Target: SCN10A; (+) strand; PAM type: YTN; PAM sequence: TTC
  source 1..20: mol_type = other DNA
aaaagtatacagcatgatct

SEQ ID NO: 72112 - DNA, 20 bp, synthetic construct
  misc_feature 1..20: note = Description of Artificial Sequence: Synthetic oligonucleotide
  misc_feature 1..20: note = Target: SCN10A; (+) strand; PAM type: YTN; PAM sequence: CTT
  source 1..20: mol_type = other DNA
tggagccccagtctatccca

SEQ ID NO: 72113 - DNA, 20 bp, synthetic construct
  misc_feature 1..20: note = Description of Artificial Sequence: Synthetic oligonucleotide
  misc_feature 1..20: note = Target: SCN10A; (+) strand; PAM type: YTN; PAM sequence: TTT
  source 1..20: mol_type = other DNA
ggagccccagtctatcccaa

SEQ ID NO: 72114 - DNA, 20 bp, synthetic construct
  misc_feature 1..20: note = Description of Artificial Sequence: Synthetic oligonucleotide
  misc_feature 1..20: note = Target: SCN10A; (+) strand; PAM type: YTN; PAM sequence: TTG
  source 1..20: mol_type = other DNA
gagccccagtctatcccaag

SEQ ID NO: 72115 - DNA, 20 bp, synthetic construct
  misc_feature 1..20: note = Description of Artificial Sequence: Synthetic oligonucleotide
  misc_feature 1..20: note = Target: SCN10A; (+) strand; PAM type: YTN; PAM sequence: CTA
  source 1..20: mol_type = other DNA
tcccaaggacatttattatc

SEQ ID NO: 72116 - DNA, 20 bp, synthetic construct
  misc_feature 1..20: note = Description of Artificial Sequence: Synthetic oligonucleotide
  misc_feature 1..20: note = Target: SCN10A; (+) strand; PAM type: YTN; PAM sequence: TTT
  source 1..20: mol_type = other DNA
attatcttcctctgggttct

SEQ ID NO: 72117 - DNA, 20 bp, synthetic construct
  misc_feature 1..20: note = Description of Artificial Sequence: Synthetic oligonucleotide
  misc_feature 1..20: note = Target: SCN10A; (+) strand; PAM type: YTN; PAM sequence: TTA
  source 1..20: mol_type = other DNA
ttatcttcctctgggttctc

SEQ ID NO: 72118 - DNA, 20 bp, synthetic construct
  misc_feature 1..20: note = Description of Artificial Sequence: Synthetic oligonucleotide
  misc_feature 1..20: note = Target: SCN10A; (+) strand; PAM type: YTN; PAM sequence: TTA
  source 1..20: mol_type = other DNA
tcttcctctgggttctcagc

SEQ ID NO: 72119 - DNA, 20 bp, synthetic construct
  misc_feature 1..20: note = Description of Artificial Sequence: Synthetic oligonucleotide
  misc_feature 1..20: note = Target: SCN10A; (+) strand; PAM type: YTN; PAM sequence: CTT
  source 1..20: mol_type = other DNA
cctctgggttctcagcaaca

SEQ ID NO: 72120 - DNA, 20 bp, synthetic construct
  misc_feature 1..20: note = Description of Artificial Sequence: Synthetic oligonucleotide
  misc_feature 1..20: note = Target: SCN10A; (+) strand; PAM type: YTN; PAM sequence: TTC
  source 1..20: mol_type = other DNA
ctctgggttctcagcaacat

SEQ ID NO: 72121 - DNA, 20 bp, synthetic construct
  misc_feature 1..20: note = Description of Artificial Sequence: Synthetic oligonucleotide
  misc_feature 1..20: note = Target: SCN10A; (+) strand; PAM type: YTN; PAM sequence: CTC
  source 1..20: mol_type = other DNA
tgggttctcagcaacatagg

SEQ ID NO: 72122 - DNA, 20 bp, synthetic construct
  misc_feature 1..20: note = Description of Artificial Sequence: Synthetic oligonucleotide
  misc_feature 1..20: note = Target: SCN10A; (+) strand; PAM type: YTN; PAM sequence: CTG
  source 1..20: mol_type = other DNA
ggttctcagcaacataggaa

SEQ ID NO: 72123 - DNA, 20 bp, synthetic construct
  misc_feature 1..20: note = Description of Artificial Sequence: Synthetic oligonucleotide
  misc_feature 1..20: note = Target: SCN10A; (+) strand; PAM type: YTN; PAM sequence: TTC
  source 1..20: mol_type = other DNA
tcagcaacataggaaacaac

SEQ ID NO: 72124 - DNA, 20 bp, synthetic construct
  misc_feature 1..20: note = Description of Artificial Sequence: Synthetic oligonucleotide
  misc_feature 1..20: note = Target: SCN10A; (+) strand; PAM type: YTN; PAM sequence: CTC
  source 1..20: mol_type = other DNA
agcaacataggaaacaacta

SEQ ID NO: 72125 - DNA, 20 bp, synthetic construct
  misc_feature 1..20: note = Description of Artificial Sequence: Synthetic oligonucleotide
  misc_feature 1..20: note = Target: SCN10A; (+) strand; PAM type: YTN; PAM sequence: CTA
  source 1..20: mol_type = other DNA
atggctattatcaatttgca

SEQ ID NO: 72126 - DNA, 20 bp, synthetic construct
  misc_feature 1..20: note = Description of Artificial Sequence: Synthetic oligonucleotide
  misc_feature 1..20: note = Target: SCN10A; (+) strand; PAM type: YTN; PAM sequence: CTA
  source 1..20: mol_type = other DNA
ttatcaatttgcatttcaaa

SEQ ID NO: 72127 - DNA, 20 bp, synthetic construct
  misc_feature 1..20: note = Description of Artificial Sequence: Synthetic oligonucleotide
  misc_feature 1..20: note = Target: SCN10A; (+) strand; PAM type: YTN; PAM sequence: TTA
  source 1..20: mol_type = other DNA
tcaatttgcatttcaaaaag

SEQ ID NO: 72128 - DNA, 20 bp, synthetic construct
  misc_feature 1..20: note = Description of Artificial Sequence: Synthetic oligonucleotide
  misc_feature 1..20: note = Target: SCN10A; (+) strand; PAM type: YTN; PAM sequence: TTT
  source 1..20: mol_type = other DNA
gcatttcaaaaagaaaatct

SEQ ID NO: 72129 - DNA, 20 bp, synthetic construct
  misc_feature 1..20: note = Description of Artificial Sequence: Synthetic oligonucleotide
  misc_feature 1..20: note = Target: SCN10A; (+) strand; PAM type: YTN; PAM sequence: TTG
  source 1..20: mol_type = other DNA
catttcaaaaagaaaatcta

SEQ ID NO: 72130 - DNA, 20 bp, synthetic construct
  misc_feature 1..20: note = Description of Artificial Sequence: Synthetic oligonucleotide
  misc_feature 1..20: note = Target: SCN10A; (+) strand; PAM type: YTN; PAM sequence: TTT
  source 1..20: mol_type = other DNA
caaaaagaaaatctagtctg

SEQ ID NO: 72131 - DNA, 20 bp, synthetic construct
  misc_feature 1..20: note = Description of Artificial Sequence: Synthetic oligonucleotide
  misc_feature 1..20: note = Target: SCN10A; (+) strand; PAM type: YTN; PAM sequence: TTC
  source 1..20: mol_type = other DNA
aaaaagaaaatctagtctga

SEQ ID NO: 72132 - DNA, 20 bp, synthetic construct
  misc_feature 1..20: note = Description of Artificial Sequence: Synthetic oligonucleotide
  misc_feature 1..20: note = Target: SCN10A; (+) strand; PAM type: YTN; PAM sequence: CTA
  source 1..20: mol_type = other DNA
gtctgattatttccacgagg

SEQ ID NO: 72133 - DNA, 20 bp, synthetic construct
  misc_feature 1..20: note = Description of Artificial Sequence: Synthetic oligonucleotide
  misc_feature 1..20: note = Target: SCN10A; (+) strand; PAM type: YTN; PAM sequence: CTG
  source 1..20: mol_type = other DNA
attatttccacgaggccaag

SEQ ID NO: 72134 - DNA, 20 bp, synthetic construct
  misc_feature 1..20: note = Description of Artificial Sequence: Synthetic oligonucleotide
  misc_feature 1..20: note = Target: SCN10A; (+) strand; PAM type: YTN; PAM sequence: TTA
  source 1..20: mol_type = other DNA
tttccacgaggccaaggatg

SEQ ID NO: 72135 - DNA, 20 bp, synthetic construct
  misc_feature 1..20: note = Description of Artificial Sequence: Synthetic oligonucleotide
  misc_feature 1..20: note = Target: SCN10A; (+) strand; PAM type: YTN; PAM sequence: TTT
  source 1..20: mol_type = other DNA
ccacgaggccaaggatgctg

SEQ ID NO: 72136 - DNA, 20 bp, synthetic construct
  misc_feature 1..20: note = Description of Artificial Sequence: Synthetic oligonucleotide
  misc_feature 1..20: note = Target: SCN10A; (+) strand; PAM type: YTN; PAM sequence: TTC
  source 1..20: mol_type = other DNA
cacgaggccaaggatgctga

SEQ ID NO: 72137 - DNA, 20 bp, synthetic construct
  misc_feature 1..20: note = Description of Artificial Sequence: Synthetic oligonucleotide
  misc_feature 1..20: note = Target: SCN10A; (+) strand; PAM type: YTN; PAM sequence: CTG
  source 1..20: mol_type = other DNA
aacatcatccaatacctgtc

SEQ ID NO: 72138 - DNA, 20 bp, synthetic construct
  misc_feature 1..20: note = Description of Artificial Sequence: Synthetic oligonucleotide
  misc_feature 1..20: note = Target: SCN10A; (+) strand; PAM type: YTN; PAM sequence: CTG
  source 1..20: mol_type = other DNA
tcacataaattcccaggatt

SEQ ID NO: 72139 - DNA, 20 bp, synthetic construct
  misc_feature 1..20: note = Description of Artificial Sequence: Synthetic oligonucleotide
  misc_feature 1..20: note = Target: SCN10A; (+) strand; PAM type: YTN; PAM sequence: TTC
  source 1..20: mol_type = other DNA
ccaggattgtgaccatatag

SEQ ID NO: 72140 - DNA, 20 bp, synthetic construct
  misc_feature 1..20: note = Description of Artificial Sequence: Synthetic oligonucleotide
  misc_feature 1..20: note = Target: SCN10A; (+) strand; PAM type: YTN; PAM sequence: TTG
  source 1..20: mol_type = other DNA
tgaccatataggtagatttg

SEQ ID NO: 72141 - DNA, 20 bp, synthetic construct
  misc_feature 1..20: note = Description of Artificial Sequence: Synthetic oligonucleotide
  misc_feature 1..20: note = Target: SCN10A; (+) strand; PAM type: YTN; PAM sequence: TTT
  source 1..20: mol_type = other DNA
gtatatgttatacttttcat

SEQ ID NO: 72142 - DNA, 20 bp, synthetic construct
  misc_feature 1..20: note = Description of Artificial Sequence: Synthetic oligonucleotide
  misc_feature 1..20: note = Target: SCN10A; (+) strand; PAM type: YTN; PAM sequence: TTG
  source 1..20: mol_type = other DNA
tatatgttatacttttcata

SEQ ID NO: 72143 - DNA, 20 bp, synthetic construct
  misc_feature 1..20: note = Description of Artificial Sequence: Synthetic oligonucleotide
  misc_feature 1..20: note = Target: SCN10A; (+) strand; PAM type: YTN; PAM sequence: TTA
  source 1..20: mol_type = other DNA
tacttttcatagtgtgcata

SEQ ID NO: 72144 - DNA, 20 bp, synthetic construct
  misc_feature 1..20: note = Description of Artificial Sequence: Synthetic oligonucleotide
  misc_feature 1..20: note = Target: SCN10A; (+) strand; PAM type: YTN; PAM sequence: CTT
  source 1..20: mol_type = other DNA
ttcatagtgtgcatataaag

SEQ ID NO: 72145 - DNA, 20 bp, synthetic construct
  misc_feature 1..20: note = Description of Artificial Sequence: Synthetic oligonucleotide
  misc_feature 1..20: note = Target: SCN10A; (+) strand; PAM type: YTN; PAM sequence: TTT
  source 1..20: mol_type = other DNA
tcatagtgtgcatataaagg

SEQ ID NO: 72146 - DNA, 20 bp, synthetic construct
  misc_feature 1..20: note = Description of Artificial Sequence: Synthetic oligonucleotide
  misc_feature 1..20: note = Target: SCN10A; (+) strand; PAM type: YTN; PAM sequence: TTT
  source 1..20: mol_type = other DNA
catagtgtgcatataaaggg

SEQ ID NO: 72147 - DNA, 20 bp, synthetic construct
  misc_feature 1..20: note = Description of Artificial Sequence: Synthetic oligonucleotide
  misc_feature 1..20: note = Target: SCN10A; (+) strand; PAM type: YTN; PAM sequence: TTC
  source 1..20: mol_type = other DNA
atagtgtgcatataaaggga

SEQ ID NO: 72148 - DNA, 20 bp, synthetic construct
  misc_feature 1..20: note = Description of Artificial Sequence: Synthetic oligonucleotide
  misc_feature 1..20: note = Target: SCN10A; (+) strand; PAM type: YTN; PAM sequence: TTA
  source 1..20: mol_type = other DNA
tgtcaacagttcagttaata

SEQ ID NO: 72149 - DNA, 20 bp, synthetic construct
  misc_feature 1..20: note = Description of Artificial Sequence: Synthetic oligonucleotide
  misc_feature 1..20: note = Target: SCN10A; (+) strand; PAM type: YTN; PAM sequence: TTC
  source 1..20: mol_type = other DNA
agttaatacaaaatctccta

SEQ ID NO: 72150 - DNA, 20 bp, synthetic construct
  misc_feature 1..20: note = Description of Artificial Sequence: Synthetic oligonucleotide
  misc_feature 1..20: note = Target: SCN10A; (+) strand; PAM type: YTN; PAM sequence: TTA
  source 1..20: mol_type = other DNA
atacaaaatctcctaaagaa

SEQ ID NO: 72151 - DNA, 20 bp, synthetic construct
  misc_feature 1..20: note = Description of Artificial Sequence: Synthetic oligonucleotide
  misc_feature 1..20: note = Target: SCN10A; (+) strand; PAM type: YTN; PAM sequence: CTC
  source 1..20: mol_type = other DNA
ctaaagaatggatttgataa

SEQ ID NO: 72152 - DNA, 20 bp, synthetic construct
  misc_feature 1..20: note = Description of Artificial Sequence: Synthetic oligonucleotide
  misc_feature 1..20: note = Target: SCN10A; (+) strand; PAM type: YTN; PAM sequence: CTA
  source 1..20: mol_type = other DNA
aagaatggatttgataatta

SEQ ID NO: 72153 - DNA, 20 bp, synthetic construct
  misc_feature 1..20: note = Description of Artificial Sequence: Synthetic oligonucleotide
  misc_feature 1..20: note = Target: SCN10A; (+) strand; PAM type: YTN; PAM sequence: TTT
  source 1..20: mol_type = other DNA
gataattactgggaatggaa

SEQ ID NO: 72154 - DNA, 20 bp, synthetic construct
  misc_feature 1..20: note = Description of Artificial Sequence: Synthetic oligonucleotide
  misc_feature 1..20: note = Target: SCN10A; (+) strand; PAM type: YTN; PAM sequence: TTG
  source 1..20: mol_type = other DNA
ataattactgggaatggaaa

SEQ ID NO: 72155 - DNA, 20 bp, synthetic construct
  misc_feature 1..20: note = Description of Artificial Sequence: Synthetic oligonucleotide
  misc_feature 1..20: note = Target: SCN10A; (+) strand; PAM type: YTN; PAM sequence: TTA
  source 1..20: mol_type = other DNA
ctgggaatggaaaggatcca

SEQ ID NO: 72156 - DNA, 20 bp, synthetic construct
  misc_feature 1..20: note = Description of Artificial Sequence: Synthetic oligonucleotide
  misc_feature 1..20: note = Target: SCN10A; (+) strand; PAM type: YTN; PAM sequence: CTG
  source 1..20: mol_type = other DNA
ggaatggaaaggatccaact

SEQ ID NO: 72157 - DNA, 20 bp, synthetic construct
  misc_feature 1..20: note = Description of Artificial Sequence: Synthetic oligonucleotide
  misc_feature 1..20: note = Target: SCN10A; (+) strand; PAM type: YTN; PAM sequence: CTT
  source 1..20: mol_type = other DNA
tggaagacgatttggcaata

SEQ ID NO: 72158 - DNA, 20 bp, synthetic construct
  misc_feature 1..20: note = Description of Artificial Sequence: Synthetic oligonucleotide
  misc_feature 1..20: note = Target: SCN10A; (+) strand; PAM type: YTN; PAM sequence: TTT
  source 1..20: mol_type = other DNA
ggaagacgatttggcaatat

SEQ ID NO: 72159 - DNA, 20 bp, synthetic construct
  misc_feature 1..20: note = Description of Artificial Sequence: Synthetic oligonucleotide
  misc_feature 1..20: note = Target: SCN10A; (+) strand; PAM type: YTN; PAM sequence: TTG
  source 1..20: mol_type = other DNA
gaagacgatttggcaatatc

SEQ ID NO: 72160 - DNA, 20 bp, synthetic construct
  misc_feature 1..20: note = Description of Artificial Sequence: Synthetic oligonucleotide
  misc_feature 1..20: note = Target: SCN10A; (+) strand; PAM type: YTN; PAM sequence: TTT
  source 1..20: mol_type = other DNA
ggcaatatctcaaaaattaa

SEQ ID NO: 72161 - DNA, 20 bp, synthetic construct
  misc_feature 1..20: note = Description of Artificial Sequence: Synthetic oligonucleotide
  misc_feature 1..20: note = Target: SCN10A; (+) strand; PAM type: YTN; PAM sequence: TTG
  source 1..20: mol_type = other DNA
gcaatatctcaaaaattaaa

SEQ ID NO: 72162 - DNA, 20 bp, synthetic construct
  misc_feature 1..20: note = Description of Artificial Sequence: Synthetic oligonucleotide
  misc_feature 1..20: note = Target: SCN10A; (+) strand; PAM type: YTN; PAM sequence: CTC
  source 1..20: mol_type = other DNA
aaaaattaaaatgtacaccc

SEQ ID NO: 72163 - DNA, 20 bp, synthetic construct
  misc_feature 1..20: note = Description of Artificial Sequence: Synthetic oligonucleotide
  misc_feature 1..20: note = Target: SCN10A; (+) strand; PAM type: YTN; PAM sequence: TTA
  source 1..20: mol_type = other DNA
aaatgtacacccctttgacc

SEQ ID NO: 72164 - DNA, 20 bp, synthetic construct
  misc_feature 1..20: note = Description of Artificial Sequence: Synthetic oligonucleotide
  misc_feature 1..20: note = Target: SCN10A; (+) strand; PAM type: YTN; PAM sequence: CTT
  source 1..20: mol_type = other DNA
tgacctggcaattctacttc

SEQ ID NO: 72165 - DNA, 20 bp, synthetic construct
  misc_feature 1..20: note = Description of Artificial Sequence: Synthetic oligonucleotide
  misc_feature 1..20: note = Target: SCN10A; (+) strand; PAM type: YTN; PAM sequence: TTT
  source 1..20: mol_type = other DNA
gacctggcaattctacttct

SEQ ID NO: 72166 - DNA, 20 bp, synthetic construct
  misc_feature 1..20: note = Description of Artificial Sequence: Synthetic oligonucleotide
  misc_feature 1..20: note = Target: SCN10A; (+) strand; PAM type: YTN; PAM sequence: TTG
  source 1..20: mol_type = other DNA
acctggcaattctacttcta

SEQ ID NO: 72167 - DNA, 20 bp, synthetic construct
  misc_feature 1..20: note = Description of Artificial Sequence: Synthetic oligonucleotide
  misc_feature 1..20: note = Target: SCN10A; (+) strand; PAM type: YTN; PAM sequence: CTG
  source 1..20: mol_type = other DNA
gcaattctacttctagaaat

SEQ ID NO: 72168 - DNA, 20 bp, synthetic construct
  misc_feature 1..20: note = Description of Artificial Sequence: Synthetic oligonucleotide
  misc_feature 1..20: note = Target: SCN10A; (+) strand; PAM type: YTN; PAM sequence: TTC
  source 1..20: mol_type = other DNA
tacttctagaaattcatcct

SEQ ID NO: 72169 - DNA, 20 bp, synthetic construct
  misc_feature 1..20: note = Description of Artificial Sequence: Synthetic oligonucleotide
  misc_feature 1..20: note = Target: SCN10A; (+) strand; PAM type: YTN; PAM sequence: CTA
  source 1..20: mol_type = other DNA
cttctagaaattcatcctta

SEQ ID NO: 72170 - DNA, 20 bp, synthetic construct
  misc_feature 1..20: note = Description of Artificial Sequence: Synthetic oligonucleotide
  misc_feature 1..20: note = Target: SCN10A; (+) strand; PAM type: YTN; PAM sequence: CTT
  source 1..20: mol_type = other DNA
ctagaaattcatccttaatt

SEQ ID NO: 72171 - DNA, 20 bp, synthetic construct
  misc_feature 1..20: note = Description of Artificial Sequence: Synthetic oligonucleotide
  misc_feature 1..20: note = Target: SCN10A; (+) strand; PAM type: YTN; PAM sequence: TTC
  source 1..20: mol_type = other DNA
tagaaattcatccttaattt

SEQ ID NO: 72172 - DNA, 20 bp, synthetic construct
  misc_feature 1..20: note = Description of Artificial Sequence: Synthetic oligonucleotide
  misc_feature 1..20: note = Target: SCN10A; (+) strand; PAM type: YTN; PAM sequence: CTA
  source 1..20: mol_type = other DNA
gaaattcatccttaatttta

SEQ ID NO: 72173 - DNA, 20 bp, synthetic construct
  misc_feature 1..20: note = Description of Artificial Sequence: Synthetic oligonucleotide
  misc_feature 1..20: note = Target: SCN10A; (+) strand; PAM type: YTN; PAM sequence: TTC
  source 1..20: mol_type = other DNA
atccttaattttactcatat

SEQ ID NO: 72174 - DNA, 20 bp, synthetic construct
  misc_feature 1..20: note = Description of Artificial Sequence: Synthetic oligonucleotide
  misc_feature 1..20: note = Target: SCN10A; (+) strand; PAM type: YTN; PAM sequence: CTT
  source 1..20: mol_type = other DNA
aattttactcatattatgtg

SEQ ID NO: 72175 - DNA, 20 bp, synthetic construct
  misc_feature 1..20: note = Description of Artificial Sequence: Synthetic oligonucleotide
  misc_feature 1..20: note = Target: SCN10A; (+) strand; PAM type: YTN; PAM sequence: TTA
  source 1..20: mol_type = other DNA
attttactcatattatgtgt

SEQ ID NO: 72176 - DNA, 20 bp, synthetic construct
  misc_feature 1..20: note = Description of Artificial Sequence: Synthetic oligonucleotide
  misc_feature 1..20: note = Target: SCN10A; (+) strand; PAM type: YTN; PAM sequence: TTT
  source 1..20: mol_type = other DNA
tactcatattatgtgtacaa

SEQ ID NO: 72177 - DNA, 20 bp, synthetic construct
  misc_feature 1..20: note = Description of Artificial Sequence: Synthetic oligonucleotide
  misc_feature 1..20: note = Target: SCN10A; (+) strand; PAM type: YTN; PAM sequence: TTT
  source 1..20: mol_type = other DNA
actcatattatgtgtacaaa

SEQ ID NO: 72178 - DNA, 20 bp, synthetic construct
  misc_feature 1..20: note = Description of Artificial Sequence: Synthetic oligonucleotide
  misc_feature 1..20: note = Target: SCN10A; (+) strand; PAM type: YTN; PAM sequence: TTA
  source 1..20: mol_type = other DNA
ctcatattatgtgtacaaag

SEQ ID NO: 72179 - DNA, 20 bp, synthetic construct
  misc_feature 1..20: note = Description of Artificial Sequence: Synthetic oligonucleotide
  misc_feature 1..20: note = Target: SCN10A; (+) strand; PAM type: YTN; PAM sequence: CTC
  source 1..20: mol_type = other DNA
atattatgtgtacaaagata

SEQ ID NO: 72180 - DNA, 20 bp, synthetic construct
  misc_feature 1..20: note = Description of Artificial Sequence: Synthetic oligonucleotide
  misc_feature 1..20: note = Target: SCN10A; (+) strand; PAM type: YTN; PAM sequence: TTA
  source 1..20: mol_type = other DNA
tgtgtacaaagatacatgtg

SEQ ID NO: 72181 - DNA, 20 bp, synthetic construct
  misc_feature 1..20: note = Description of Artificial Sequence: Synthetic oligonucleotide
  misc_feature 1..20: note = Target: SCN10A; (+) strand; PAM type: YTN; PAM sequence: CTC
  source 1..20: mol_type = other DNA
accaaaaaattaatatgtgg

SEQ ID NO: 72182 - DNA, 20 bp, synthetic construct
  misc_feature 1..20: note = Description of Artificial Sequence: Synthetic oligonucleotide
  misc_feature 1..20: note = Target: SCN10A; (+) strand; PAM type: YTN; PAM sequence: TTA
  source 1..20: mol_type = other DNA
atatgtggtggcaaaatatg

SEQ ID NO: 72183 - DNA, 20 bp, synthetic construct
  misc_feature 1..20: note = Description of Artificial Sequence: Synthetic oligonucleotide
  misc_feature 1..20: note = Target: SCN10A; (+) strand; PAM type: YTN; PAM sequence: TTA
  source 1..20: mol_type = other DNA
tgttaattatgataaatgtg

SEQ ID NO: 72184 - DNA, 20 bp, synthetic construct
  misc_feature 1..20: note = Description of Artificial Sequence: Synthetic oligonucleotide
  misc_feature 1..20: note = Target: SCN10A; (+) strand; PAM type: YTN; PAM sequence: TTA
  source 1..20: mol_type = other DNA
attatgataaatgtgaatgt

SEQ ID NO: 72185 - DNA, 20 bp, synthetic construct
  misc_feature 1..20: note = Description of Artificial Sequence: Synthetic oligonucleotide
  misc_feature 1..20: note = Target: SCN10A; (+) strand; PAM type: YTN; PAM sequence: TTA
  source 1..20: mol_type = other DNA
tgataaatgtgaatgtctat

SEQ ID NO: 72186 - DNA, 20 bp, synthetic construct
  misc_feature 1..20: note = Description of Artificial Sequence: Synthetic oligonucleotide
  misc_feature 1..20: note = Target: SCN10A; (+) strand; PAM type: YTN; PAM sequence: CTA
  source 1..20: mol_type = other DNA
tcaataggaaaatagttaaa

SEQ ID NO: 72187 - DNA, 20 bp, synthetic construct
  misc_feature 1..20: note = Description of Artificial Sequence: Synthetic oligonucleotide
  misc_feature 1..20: note = Target: SCN10A; (+) strand; PAM type: YTN; PAM sequence: TTA
  source 1..20: mol_type = other DNA
aataaacttcacttcatcca

SEQ ID NO: 72188 - DNA, 20 bp, synthetic construct
  misc_feature 1..20: note = Description of Artificial Sequence: Synthetic oligonucleotide
  misc_feature 1..20: note = Target: SCN10A; (+) strand; PAM type: YTN; PAM sequence: CTT
  source 1..20: mol_type = other DNA
cacttcatccatgcaaatga

SEQ ID NO: 72189 - DNA, 20 bp, synthetic construct
  misc_feature 1..20: note = Description of Artificial Sequence: Synthetic oligonucleotide
  misc_feature 1..20: note = Target: SCN10A; (+) strand; PAM type: YTN; PAM sequence: TTC
  source 1..20: mol_type = other DNA
acttcatccatgcaaatgaa

SEQ ID NO: 72190 - DNA, 20 bp, synthetic construct
  misc_feature 1..20: note = Description of Artificial Sequence: Synthetic oligonucleotide
  misc_feature 1..20: note = Target: SCN10A; (+) strand; PAM type: YTN; PAM sequence: CTT
  source 1..20: mol_type = other DNA
catccatgcaaatgaaatct

SEQ ID NO: 72191 - DNA, 20 bp, synthetic construct
  misc_feature 1..20: note = Description of Artificial Sequence: Synthetic oligonucleotide
  misc_feature 1..20: note = Target: SCN10A; (+) strand; PAM type: YTN; PAM sequence: TTC
  source 1..20: mol_type = other DNA
atccatgcaaatgaaatctg

SEQ ID NO: 72192 - DNA, 20 bp, synthetic construct
  misc_feature 1..20: note = Description of Artificial Sequence: Synthetic oligonucleotide
  misc_feature 1..20: note = Target: SCN10A; (+) strand; PAM type: YTN; PAM sequence: CTG
  source 1..20: mol_type = other DNA
ttcagctaatttctataaaa

SEQ ID NO: 72193 - DNA, 20 bp, synthetic construct
  misc_feature 1..20: note = Description of Artificial Sequence: Synthetic oligonucleotide
  misc_feature 1..20: note = Target: SCN10A; (+) strand; PAM type: YTN; PAM sequence: TTC
  source 1..20: mol_type = other DNA
agctaatttctataaaacag

SEQ ID NO: 72194 - DNA, 20 bp, synthetic construct
  misc_feature 1..20: note = Description of Artificial Sequence: Synthetic oligonucleotide
  misc_feature 1..20: note = Target: SCN10A; (+) strand; PAM type: YTN; PAM sequence: CTA
  source 1..20: mol_type = other DNA
atttctataaaacagctgct

SEQ ID NO: 72195 - DNA, 20 bp, synthetic construct
  misc_feature 1..20: note = Description of Artificial Sequence: Synthetic oligonucleotide
  misc_feature 1..20: note = Target: SCN10A; (+) strand; PAM type: YTN; PAM sequence: TTT
  source 1..20: mol_type = other DNA
ctataaaacagctgctgctg

SEQ ID NO: 72196 - DNA, 20 bp, synthetic construct
  misc_feature 1..20: note = Description of Artificial Sequence: Synthetic oligonucleotide
  misc_feature 1..20: note = Target: SCN10A; (+) strand; PAM type: YTN; PAM sequence: TTC
  source 1..20: mol_type = other DNA
tataaaacagctgctgctgg

SEQ ID NO: 72197 - DNA, 20 bp, synthetic construct
  misc_feature 1..20: note = Description of Artificial Sequence: Synthetic oligonucleotide
  misc_feature 1..20: note = Target: SCN10A; (+) strand; PAM type: YTN; PAM sequence: CTA
  source 1..20: mol_type = other DNA
taaaacagctgctgctggga

SEQ ID NO: 72198 - DNA, 20 bp, synthetic construct
  misc_feature 1..20: note = Description of Artificial Sequence: Synthetic oligonucleotide
  misc_feature 1..20: note = Target: SCN10A; (+) strand; PAM type: YTN; PAM sequence: CTG
  source 1..20: mol_type = other DNA
ctgctgggatttttttgggg

SEQ ID NO: 72199 - DNA, 20 bp, synthetic construct
  misc_feature 1..20: note = Description of Artificial Sequence: Synthetic oligonucleotide
  misc_feature 1..20: note = Target: SCN10A; (+) strand; PAM type: YTN; PAM sequence: CTG
  source 1..20: mol_type = other DNA
ctgggatttttttggggatg

SEQ ID NO: 72200 - DNA, 20 bp, synthetic construct
  misc_feature 1..20: note = Description of Artificial Sequence: Synthetic oligonucleotide
  misc_feature 1..20: note = Target: SCN10A; (+) strand; PAM type: YTN; PAM sequence: CTG
  source 1..20: mol_type = other DNA
ggatttttttggggatgtca

SEQ ID NO: 72201 - DNA, 20 bp, synthetic construct
  misc_feature 1..20: note = Description of Artificial Sequence: Synthetic oligonucleotide
  misc_feature 1..20: note = Target: SCN10A; (+) strand; PAM type: YTN; PAM sequence: TTT
  source 1..20: mol_type = other DNA
ttttggggatgtcattgaat

SEQ ID NO: 72202 - DNA, 20 bp, synthetic construct
  misc_feature 1..20: note = Description of Artificial Sequence: Synthetic oligonucleotide
  misc_feature 1..20: note = Target: SCN10A; (+) strand; PAM type: YTN; PAM sequence: TTT
  source 1..20: mol_type = other DNA
tttggggatgtcattgaatt

SEQ ID NO: 72203 - DNA, 20 bp, synthetic construct
  misc_feature 1..20: note = Description of Artificial Sequence: Synthetic oligonucleotide
  misc_feature 1..20: note = Target: SCN10A; (+) strand; PAM type: YTN; PAM sequence: TTT
  source 1..20: mol_type = other DNA
ttggggatgtcattgaattt

SEQ ID NO: 72204 - DNA, 20 bp, synthetic construct
  misc_feature 1..20: note = Description of Artificial Sequence: Synthetic oligonucleotide
  misc_feature 1..20: note = Target: SCN10A; (+) strand; PAM type: YTN; PAM sequence: TTT
  source 1..20: mol_type = other DNA
tggggatgtcattgaattta

SEQ ID NO: 72205 - DNA, 20 bp, synthetic construct
  misc_feature 1..20: note = Description of Artificial Sequence: Synthetic oligonucleotide
  misc_feature 1..20: note = Target: SCN10A; (+) strand; PAM type: YTN; PAM sequence: TTT
  source 1..20: mol_type = other DNA
ggggatgtcattgaatttat

SEQ ID NO: 72206 - DNA, 20 bp, synthetic construct
  misc_feature 1..20: note = Description of Artificial Sequence: Synthetic oligonucleotide
  misc_feature 1..20: note = Target: SCN10A; (+) strand; PAM type: YTN; PAM sequence: TTG
  source 1..20: mol_type = other DNA
gggatgtcattgaatttata

SEQ ID NO: 72207 - DNA, 20 bp, synthetic construct
  misc_feature 1..20: note = Description of Artificial Sequence: Synthetic oligonucleotide
  misc_feature 1..20: note = Target: SCN10A; (+) strand; PAM type: YTN; PAM sequence: TTG
  source 1..20: mol_type = other DNA
aatttatagactaatttggg

SEQ ID NO: 72208 - DNA, 20 bp, synthetic construct
  misc_feature 1..20: note = Description of Artificial Sequence: Synthetic oligonucleotide
  misc_feature 1..20: note = Target: SCN10A; (+) strand; PAM type: YTN; PAM sequence: TTT
  source 1..20: mol_type = other DNA
atagactaatttgggcagca

SEQ ID NO: 72209 - DNA, 20 bp, synthetic construct
  misc_feature 1..20: note = Description of Artificial Sequence: Synthetic oligonucleotide
  misc_feature 1..20: note = Target: SCN10A; (+) strand; PAM type: YTN; PAM sequence: TTA
  source 1..20: mol_type = other DNA
tagactaatttgggcagcac

SEQ ID NO: 72210 - DNA, 20 bp, synthetic construct
  misc_feature 1..20: note = Description of Artificial Sequence: Synthetic oligonucleotide
  misc_feature 1..20: note = Target: SCN10A; (+) strand; PAM type: YTN; PAM sequence: CTA
  source 1..20: mol_type = other DNA
atttgggcagcactgacatt

SEQ ID NO: 72211 - DNA, 20 bp, synthetic construct
  misc_feature 1..20: note = Description of Artificial Sequence: Synthetic oligonucleotide
  misc_feature 1..20: note = Target: SCN10A; (+) strand; PAM type: YTN; PAM sequence: TTT
  source 1..20: mol_type = other DNA
gggcagcactgacattctaa

SEQ ID NO: 72212 - DNA, 20 bp, synthetic construct
  misc_feature 1..20: note = Description of Artificial Sequence: Synthetic oligonucleotide
  misc_feature 1..20: note = Target: SCN10A; (+) strand; PAM type: YTN; PAM sequence: TTG
  source 1..20: mol_type = other DNA
ggcagcactgacattctaac

SEQ ID NO: 72213 - DNA, 20 bp, synthetic construct
  misc_feature 1..20: note = Description of Artificial Sequence: Synthetic oligonucleotide
  misc_feature 1..20: note = Target: SCN10A; (+) strand; PAM type: YTN; PAM sequence: CTG
  source 1..20: mol_type = other DNA
acattctaacaattatgaat

SEQ ID NO: 72214 - DNA, 20 bp, synthetic construct
  misc_feature 1..20: note = Description of Artificial Sequence: Synthetic oligonucleotide
  misc_feature 1..20: note = Target: SCN10A; (+) strand; PAM type: YTN; PAM sequence: TTC
  source 1..20: mol_type = other DNA
taacaattatgaatcttcta

SEQ ID NO: 72215 - DNA, 20 bp, synthetic construct
  misc_feature 1..20: note = Description of Artificial Sequence: Synthetic oligonucleotide
  misc_feature 1..20: note = Target: SCN10A; (+) strand; PAM type: YTN; PAM sequence: CTA
  source 1..20: mol_type = other DNA
acaattatgaatcttctaat

SEQ ID NO: 72216 - DNA, 20 bp, synthetic construct
  misc_feature 1..20: note = Description of Artificial Sequence: Synthetic oligonucleotide
  misc_feature 1..20: note = Target: SCN10A; (+) strand; PAM type: YTN; PAM sequence: TTA
  source 1..20: mol_type = other DNA
tgaatcttctaatccagtca

SEQ ID NO: 72217 - DNA, 20 bp, synthetic construct
  misc_feature 1..20: note = Description of Artificial Sequence: Synthetic oligonucleotide
  misc_feature 1..20: note = Target: SCN10A; (+) strand; PAM type: YTN; PAM sequence: CTT
  source 1..20: mol_type = other DNA
ctaatccagtcacatgagac

SEQ ID NO: 72218 - DNA, 20 bp, synthetic construct
  misc_feature 1..20: note = Description of Artificial Sequence: Synthetic oligonucleotide
  misc_feature 1..20: note = Target: SCN10A; (+) strand; PAM type: YTN; PAM sequence: TTC
  source 1..20: mol_type = other DNA
taatccagtcacatgagaca

SEQ ID NO: 72219 - DNA, 20 bp, synthetic construct
  misc_feature 1..20: note = Description of Artificial Sequence: Synthetic oligonucleotide
  misc_feature 1..20: note = Target: SCN10A; (+) strand; PAM type: YTN; PAM sequence: CTA
  source 1..20: mol_type = other DNA
atccagtcacatgagacatc

SEQ ID NO: 72220 - DNA, 20 bp, synthetic construct
  misc_feature 1..20: note = Description of Artificial Sequence: Synthetic oligonucleotide
  misc_feature 1..20: note = Target: SCN10A; (+) strand; PAM type: YTN; PAM sequence: CTT
  source 1..20: mol_type = other DNA
taattcatttaggtacttta

SEQ ID NO: 72221 - DNA, 20 bp, synthetic construct
  misc_feature 1..20: note = Description of Artificial Sequence: Synthetic oligonucleotide
  misc_feature 1..20: note = Target: SCN10A; (+) strand; PAM type: YTN; PAM sequence: TTT
  source 1..20: mol_type = other DNA
aattcatttaggtactttaa

SEQ ID NO: 72222 - DNA, 20 bp, synthetic construct
  misc_feature 1..20: note = Description of Artificial Sequence: Synthetic oligonucleotide
  misc_feature 1..20: note = Target: SCN10A; (+) strand; PAM type: YTN; PAM sequence: TTA
  source 1..20: mol_type = other DNA
attcatttaggtactttaaa

SEQ ID NO: 72223 - DNA, 20 bp, synthetic construct
  misc_feature 1..20: note = Description of Artificial Sequence: Synthetic oligonucleotide
  misc_feature 1..20: note = Target: SCN10A; (+) strand; PAM type: YTN; PAM sequence: TTC
  source 1..20: mol_type = other DNA
atttaggtactttaaaattt

SEQ ID NO: 72224 - DNA, 20 bp, synthetic construct
  misc_feature 1..20: note = Description of Artificial Sequence: Synthetic oligonucleotide
  misc_feature 1..20: note = Target: SCN10A; (+) strand; PAM type: YTN; PAM sequence: TTT
  source 1..20: mol_type = other DNA
aggtactttaaaatttctct

SEQ ID NO: 72225 - DNA, 20 bp, synthetic construct
  misc_feature 1..20: note = Description of Artificial Sequence: Synthetic oligonucleotide
  misc_feature 1..20: note = Target: SCN10A; (+) strand; PAM type: YTN; PAM sequence: TTA
  source 1..20: mol_type = other DNA
ggtactttaaaatttctctc

SEQ ID NO: 72226 - DNA, 20 bp, synthetic construct
  misc_feature 1..20: note = Description of Artificial Sequence: Synthetic oligonucleotide
  misc_feature 1..20: note = Target: SCN10A; (+) strand; PAM type: YTN; PAM sequence: CTT
  source 1..20: mol_type = other DNA
taaaatttctctcaataatg

SEQ ID NO: 72227 - DNA, 20 bp, synthetic construct
  misc_feature 1..20: note = Description of Artificial Sequence: Synthetic oligonucleotide
  misc_feature 1..20: note = Target: SCN10A; (+) strand; PAM type: YTN; PAM sequence: TTT
  source 1..20: mol_type = other DNA
aaaatttctctcaataatgc

SEQ ID NO: 72228 - DNA, 20 bp, synthetic construct
  misc_feature 1..20: note = Description of Artificial Sequence: Synthetic oligonucleotide
  misc_feature 1..20: note = Target: SCN10A; (+) strand; PAM type: YTN; PAM sequence: TTA
  source 1..20: mol_type = other DNA
aaatttctctcaataatgct

SEQ ID NO: 72229 - DNA, 20 bp, synthetic construct
  misc_feature 1..20: note = Description of Artificial Sequence: Synthetic oligonucleotide
  misc_feature 1..20: note = Target: SCN10A; (+) strand; PAM type: YTN; PAM sequence: TTT
  source 1..20: mol_type = other DNA
ctctcaataatgctgtatta

SEQ ID NO: 72230 - DNA, 20 bp, synthetic construct
  misc_feature 1..20: note = Description of Artificial Sequence: Synthetic oligonucleotide
  misc_feature 1..20: note = Target: SCN10A; (+) strand; PAM type: YTN; PAM sequence: TTC
  source 1..20: mol_type = other DNA
tctcaataatgctgtattat

SEQ ID NO: 72231 - DNA, 20 bp, synthetic construct
  misc_feature 1..20: note = Description of Artificial Sequence: Synthetic oligonucleotide
  misc_feature 1..20: note = Target: SCN10A; (+) strand; PAM type: YTN; PAM sequence: CTC
  source 1..20: mol_type = other DNA
tcaataatgctgtattattt

SEQ ID NO: 72232 - DNA, 20 bp, synthetic construct
  misc_feature 1..20: note = Description of Artificial Sequence: Synthetic oligonucleotide
  misc_feature 1..20: note = Target: SCN10A; (+) strand; PAM type: YTN; PAM sequence: CTC
  source 1..20: mol_type = other DNA
aataatgctgtattattttt

SEQ ID NO: 72233 - DNA, 20 bp, synthetic construct
  misc_feature 1..20: note = Description of Artificial Sequence: Synthetic oligonucleotide
  misc_feature 1..20: note = Target: SCN10A; (+) strand; PAM type: YTN; PAM sequence: CTG
  source 1..20: mol_type = other DNA
tattattttttagtataaag

SEQ ID NO: 72234 - DNA, 20 bp, synthetic construct
  misc_feature 1..20: note = Description of Artificial Sequence: Synthetic oligonucleotide
  misc_feature 1..20: note = Target: SCN10A; (+) strand; PAM type: YTN; PAM sequence: TTA
  source 1..20: mol_type = other DNA
ttttttagtataaaggtctt

SEQ ID NO: 72235 - DNA, 20 bp, synthetic construct
  misc_feature 1..20: note = Description of Artificial Sequence: Synthetic oligonucleotide
  misc_feature 1..20: note = Target: SCN10A; (+) strand; PAM type: YTN; PAM sequence: TTT
  source 1..20: mol_type = other DNA
tttagtataaaggtcttgtg

SEQ ID NO: 72236 - DNA, 20 bp, synthetic construct
  misc_feature 1..20: note = Description of Artificial Sequence: Synthetic oligonucleotide
  misc_feature 1..20: note = Target: SCN10A; (+) strand; PAM type: YTN; PAM sequence: TTT
  source 1..20: mol_type = other DNA
ttagtataaaggtcttgtgc

SEQ ID NO: 72237 - DNA, 20 bp, synthetic construct
  misc_feature 1..20: note = Description of Artificial Sequence: Synthetic oligonucleotide
  misc_feature 1..20: note = Target: SCN10A; (+) strand; PAM type: YTN; PAM sequence: TTT
  source 1..20: mol_type = other DNA
tagtataaaggtcttgtgca

SEQ ID NO: 72238 - DNA, 20 bp, synthetic construct
  misc_feature 1..20: note = Description of Artificial Sequence: Synthetic oligonucleotide
  misc_feature 1..20: note = Target: SCN10A; (+) strand; PAM type: YTN; PAM sequence: TTT
  source 1..20: mol_type = other DNA
agtataaaggtcttgtgcat

SEQ ID NO: 72239 - DNA, 20 bp, synthetic construct
  misc_feature 1..20: note = Description of Artificial Sequence: Synthetic oligonucleotide
  misc_feature 1..20: note = Target: SCN10A; (+) strand; PAM type: YTN; PAM sequence: TTA
  source 1..20: mol_type = other DNA
gtataaaggtcttgtgcata

SEQ ID NO: 72240 - DNA, 20 bp, synthetic construct
  misc_feature 1..20: note = Description of Artificial Sequence: Synthetic oligonucleotide
  misc_feature 1..20: note = Target: SCN10A; (+) strand; PAM type: YTN; PAM sequence: CTT
  source 1..20: mol_type = other DNA
gtgcatatttttacaacagc

SEQ ID NO: 72241 - DNA, 20 bp, synthetic construct
  misc_feature 1..20: note = Description of Artificial Sequence: Synthetic oligonucleotide
  misc_feature 1..20: note = Target: SCN10A; (+) strand; PAM type: YTN; PAM sequence: TTG
  source 1..20: mol_type = other DNA
tgcatatttttacaacagca

SEQ ID NO: 72242 - DNA, 20 bp, synthetic construct
  misc_feature 1..20: note = Description of Artificial Sequence: Synthetic oligonucleotide
  misc_feature 1..20: note = Target: SCN10A; (+) strand; PAM type: YTN; PAM sequence: TTT
  source 1..20: mol_type = other DNA
ttacaacagcatttggattt

SEQ ID NO: 72243 - DNA, 20 bp, synthetic construct
  misc_feature 1..20: note = Description of Artificial Sequence: Synthetic oligonucleotide
  misc_feature 1..20: note = Target: SCN10A; (+) strand; PAM type: YTN; PAM sequence: TTT
  source 1..20: mol_type = other DNA
tacaacagcatttggattta

SEQ ID NO: 72244 - DNA, 20 bp, synthetic construct
  misc_feature 1..20: note = Description of Artificial Sequence: Synthetic oligonucleotide
  misc_feature 1..20: note = Target: SCN10A; (+) strand; PAM type: YTN; PAM sequence: TTT
  source 1..20: mol_type = other DNA
acaacagcatttggatttat

SEQ ID NO: 72245 - DNA, 20 bp, synthetic construct
  misc_feature 1..20: note = Description of Artificial Sequence: Synthetic oligonucleotide
  misc_feature 1..20: note = Target: SCN10A; (+) strand; PAM type: YTN; PAM sequence: TTA
  source 1..20: mol_type = other DNA
caacagcatttggatttatt

SEQ ID NO: 72246 - DNA, 20 bp, synthetic construct
  misc_feature 1..20: note = Description of Artificial Sequence: Synthetic oligonucleotide
  misc_feature 1..20: note = Target: SCN10A; (+) strand; PAM type: YTN; PAM sequence: TTT
  source 1..20: mol_type = other DNA
ggatttattagatctactgt

SEQ ID NO: 72247 - DNA, 20 bp, synthetic construct
  misc_feature 1..20: note = Description of Artificial Sequence: Synthetic oligonucleotide
  misc_feature 1..20: note = Target: SCN10A; (+) strand; PAM type: YTN; PAM sequence: TTG
  source 1..20: mol_type = other DNA
gatttattagatctactgtt

SEQ ID NO: 72248 - DNA, 20 bp, synthetic construct
  misc_feature 1..20: note = Description of Artificial Sequence: Synthetic oligonucleotide
  misc_feature 1..20: note = Target: SCN10A; (+) strand; PAM type: YTN; PAM sequence: TTT
  source 1..20: mol_type = other DNA
attagatctactgtttttct

SEQ ID NO: 72249 - DNA, 20 bp, synthetic construct
  misc_feature 1..20: note = Description of Artificial Sequence: Synthetic oligonucleotide
  misc_feature 1..20: note = Target: SCN10A; (+) strand; PAM type: YTN; PAM sequence: TTA
  source 1..20: mol_type = other DNA
ttagatctactgtttttcta

SEQ ID NO: 72250 - DNA, 20 bp, synthetic construct
  misc_feature 1..20: note = Description of Artificial Sequence: Synthetic oligonucleotide
  misc_feature 1..20: note = Target: SCN10A; (+) strand; PAM type: YTN; PAM sequence: TTA
  source 1..20: mol_type = other DNA
gatctactgtttttctattt

SEQ ID NO: 72251 - DNA, 20 bp, synthetic construct
  misc_feature 1..20: note = Description of Artificial Sequence: Synthetic oligonucleotide
  misc_feature 1..20: note = Target: SCN10A; (+) strand; PAM type: YTN; PAM sequence: CTA
  source 1..20: mol_type = other DNA
ctgtttttctattttgtaat

SEQ ID NO: 72252 - DNA, 20 bp, synthetic construct
  misc_feature 1..20: note = Description of Artificial Sequence: Synthetic oligonucleotide
  misc_feature 1..20: note = Target: SCN10A; (+) strand; PAM type: YTN; PAM sequence: CTG
  source 1..20: mol_type = other DNA
tttttctattttgtaattta

SEQ ID NO: 72253 - DNA, 20 bp, synthetic construct
  misc_feature 1..20: note = Description of Artificial Sequence: Synthetic oligonucleotide
  misc_feature 1..20: note = Target: SCN10A; (+) strand; PAM type: YTN; PAM sequence: TTT
  source 1..20: mol_type = other DNA
ttctattttgtaatttattg

SEQ ID NO: 72254 - DNA, 20 bp, synthetic construct
  misc_feature 1..20: note = Description of Artificial Sequence: Synthetic oligonucleotide
  misc_feature 1..20: note = Target: SCN10A; (+) strand; PAM type: YTN; PAM sequence: TTT
  source 1..20: mol_type = other DNA
tctattttgtaatttattgc

SEQ ID NO: 72255 - DNA, 20 bp, synthetic construct
  misc_feature 1..20: note = Description of Artificial Sequence: Synthetic oligonucleotide
  misc_feature 1..20: note = Target: SCN10A; (+) strand; PAM type: YTN; PAM sequence: TTT
  source 1..20: mol_type = other DNA
ctattttgtaatttattgct

SEQ ID NO: 72256 - DNA, 20 bp, synthetic construct
  misc_feature 1..20: note = Description of Artificial Sequence: Synthetic oligonucleotide
  misc_feature 1..20: note = Target: SCN10A; (+) strand; PAM type: YTN; PAM sequence: TTC
  source 1..20: mol_type = other DNA
tattttgtaatttattgctt

SEQ ID NO: 72257 - DNA, 20 bp, synthetic construct
  misc_feature 1..20: note = Description of Artificial Sequence: Synthetic oligonucleotide
  misc_feature 1..20: note = Target: SCN10A; (+) strand; PAM type: YTN; PAM sequence: CTA
  source 1..20: mol_type = other DNA
ttttgtaatttattgctttt

SEQ ID NO: 72258 - DNA, 20 bp, synthetic construct
  misc_feature 1..20: note = Description of Artificial Sequence: Synthetic oligonucleotide
  misc_feature 1..20: note = Target: SCN10A; (+) strand; PAM type: YTN; PAM sequence: TTT
  source 1..20: mol_type = other DNA
tgtaatttattgctttttat

SEQ ID NO: 72259 - DNA, 20 bp, synthetic construct
  misc_feature 1..20: note = Description of Artificial Sequence: Synthetic oligonucleotide
  misc_feature 1..20: note = Target: SCN10A; (+) strand; PAM type: YTN; PAM sequence: TTT
  source 1..20: mol_type = other DNA
gtaatttattgctttttata

SEQ ID NO: 72260 - DNA, 20 bp, synthetic construct
  misc_feature 1..20: note = Description of Artificial Sequence: Synthetic oligonucleotide
  misc_feature 1..20: note = Target: SCN10A; (+) strand; PAM type: YTN; PAM sequence: TTG
  source 1..20: mol_type = other DNA
taatttattgctttttataa

SEQ ID NO: 72261 - DNA, 20 bp, synthetic construct
  misc_feature 1..20: note = Description of Artificial Sequence: Synthetic oligonucleotide
  misc_feature 1..20: note = Target: SCN10A; (+) strand; PAM type: YTN; PAM sequence: TTT
  source 1..20: mol_type = other DNA
attgctttttataattatta

SEQ ID NO: 72262 - DNA, 20 bp, synthetic construct
  misc_feature 1..20: note = Description of Artificial Sequence: Synthetic oligonucleotide
  misc_feature 1..20: note = Target: SCN10A; (+) strand; PAM type: YTN; PAM sequence: TTA
  source 1..20: mol_type = other DNA
ttgctttttataattattaa

SEQ ID NO: 72263 - DNA, 20 bp, synthetic construct
  misc_feature 1..20: note = Description of Artificial Sequence: Synthetic oligonucleotide
  misc_feature 1..20: note = Target: SCN10A; (+) strand; PAM type: YTN; PAM sequence: TTG
  source 1..20: mol_type = other DNA
ctttttataattattaactt

SEQ ID NO: 72264 - DNA, 20 bp, synthetic construct
  misc_feature 1..20: note = Description of Artificial Sequence: Synthetic oligonucleotide
  misc_feature 1..20: note = Target: SCN10A; (+) strand; PAM type: YTN; PAM sequence: CTT
  source 1..20: mol_type = other DNA
tttataattattaacttctt

SEQ ID NO: 72265 - DNA, 20 bp, synthetic construct
  misc_feature 1..20: note = Description of Artificial Sequence: Synthetic oligonucleotide
  misc_feature 1..20: note = Target: SCN10A; (+) strand; PAM type: YTN; PAM sequence: TTT
  source 1..20: mol_type = other DNA
ttataattattaacttcttt

SEQ ID NO: 72266 - DNA, 20 bp, synthetic construct
  misc_feature 1..20: note = Description of Artificial Sequence: Synthetic oligonucleotide
  misc_feature 1..20: note = Target: SCN10A; (+) strand; PAM type: YTN; PAM sequence: TTT
  source 1..20: mol_type = other DNA
tataattattaacttctttc

SEQ ID NO: 72267 - DNA, 20 bp, synthetic construct
  misc_feature 1..20: note = Description of Artificial Sequence: Synthetic oligonucleotide
  misc_feature 1..20: note = Target: SCN10A; (+) strand; PAM type: YTN; PAM sequence: TTT
  source 1..20: mol_type = other DNA
ataattattaacttctttct

SEQ ID NO: 72268 - DNA, 20 bp, synthetic construct
  misc_feature 1..20: note = Description of Artificial Sequence: Synthetic oligonucleotide
  misc_feature 1..20: note = Target: SCN10A; (+) strand; PAM type: YTN; PAM sequence: TTA
  source 1..20: mol_type = other DNA
taattattaacttctttctt

SEQ ID NO: 72269 - DNA, 20 bp, synthetic construct
  misc_feature 1..20: note = Description of Artificial Sequence: Synthetic oligonucleotide
  misc_feature 1..20: note = Target: SCN10A; (+) strand; PAM type: YTN; PAM sequence: TTA
  source 1..20: mol_type = other DNA
ttaacttctttctttcattt

SEQ ID NO: 72270 - DNA, 20 bp, synthetic construct
  misc_feature 1..20: note = Description of Artificial Sequence: Synthetic oligonucleotide
  misc_feature 1..20: note = Target: SCN10A; (+) strand; PAM type: YTN; PAM sequence: TTA
  source 1..20: mol_type = other DNA
acttctttctttcatttgtt

SEQ ID NO: 72271 - DNA, 20 bp, synthetic construct
  misc_feature 1..20: note = Description of Artificial Sequence: Synthetic oligonucleotide
  misc_feature 1..20: note = Target: SCN10A; (+) strand; PAM type: YTN; PAM sequence: CTT
  source 1..20: mol_type = other DNA
ctttctttcatttgttatcc

SEQ ID NO: 72272 - DNA, 20 bp, synthetic construct
  misc_feature 1..20: note = Description of Artificial Sequence: Synthetic oligonucleotide
  misc_feature 1..20: note = Target: SCN10A; (+) strand; PAM type: YTN; PAM sequence: TTC
  source 1..20: mol_type = other DNA
tttctttcatttgttatcct

SEQ ID NO: 72273 - DNA, 20 bp, synthetic construct
  misc_feature 1..20: note = Description of Artificial Sequence: Synthetic oligonucleotide
  misc_feature 1..20: note = Target: SCN10A; (+) strand; PAM type: YTN; PAM sequence: CTT
  source 1..20: mol_type = other DNA
tctttcatttgttatccttt

SEQ ID NO: 72274 - DNA, 20 bp, synthetic construct
  misc_feature 1..20: note = Description of Artificial Sequence: Synthetic oligonucleotide
  misc_feature 1..20: note = Target: SCN10A; (+) strand; PAM type: YTN; PAM sequence: TTT
  source 1..20: mol_type = other DNA
ctttcatttgttatcctttt

SEQ ID NO: 72275 - DNA, 20 bp, synthetic construct
  misc_feature 1..20: note = Description of Artificial Sequence: Synthetic oligonucleotide
  misc_feature 1..20: note = Target: SCN10A; (+) strand; PAM type: YTN; PAM sequence: TTC
  source 1..20: mol_type = other DNA
tttcatttgttatccttttt

SEQ ID NO: 72276 - DNA, 20 bp, synthetic construct
  misc_feature 1..20: note = Description of Artificial Sequence: Synthetic oligonucleotide
  misc_feature 1..20: note = Target: SCN10A; (+) strand; PAM type: YTN; PAM sequence: CTT
  source 1..20: mol_type = other DNA
tcatttgttatcctttttct

SEQ ID NO: 72277 - DNA, 20 bp, synthetic construct
  misc_feature 1..20: note = Description of Artificial Sequence: Synthetic oligonucleotide
  misc_feature 1..20: note = Target: SCN10A; (+) strand; PAM type: YTN; PAM sequence: TTT
  source 1..20: mol_type = other DNA
catttgttatcctttttcta

SEQ ID NO: 72278 - DNA, 20 bp, synthetic construct
  misc_feature 1..20: note = Description of Artificial Sequence: Synthetic oligonucleotide
  misc_feature 1..20: note = Target: SCN10A; (+) strand; PAM type: YTN; PAM sequence: TTC
  source 1..20: mol_type = other DNA
atttgttatcctttttctag

SEQ ID NO: 72279 - DNA, 20 bp, synthetic construct
  misc_feature 1..20: note = Description of Artificial Sequence: Synthetic oligonucleotide
  misc_feature 1..20: note = Target: SCN10A; (+) strand; PAM type: YTN; PAM sequence: TTT
  source 1..20: mol_type = other DNA
gttatcctttttctagtttt

SEQ ID NO: 72280 - DNA, 20 bp, synthetic construct
  misc_feature 1..20: note = Description of Artificial Sequence: Synthetic oligonucleotide
  misc_feature 1..20: note = Target: SCN10A; (+) strand; PAM type: YTN; PAM sequence: TTG
  source 1..20: mol_type = other DNA
ttatcctttttctagttttg

SEQ ID NO: 72281 - DNA, 20 bp, synthetic construct
  misc_feature 1..20: note = Description of Artificial Sequence: Synthetic oligonucleotide
  misc_feature 1..20: note = Target: SCN10A; (+) strand; PAM type: YTN; PAM sequence: TTA
  source 1..20: mol_type = other DNA
tcctttttctagttttgtta

SEQ ID NO: 72282 - DNA, 20 bp, synthetic construct
  misc_feature 1..20: note = Description of Artificial Sequence: Synthetic oligonucleotide
  misc_feature 1..20: note = Target: SCN10A; (+) strand; PAM type: YTN; PAM sequence: CTT
  source 1..20: mol_type = other DNA
tttctagttttgttaggtct

SEQ ID NO: 72283 - DNA, 20 bp, synthetic construct
  misc_feature 1..20: note = Description of Artificial Sequence: Synthetic oligonucleotide
  misc_feature 1..20: note = Target: SCN10A; (+) strand; PAM type: YTN; PAM sequence: TTT
  source 1..20: mol_type = other DNA
ttctagttttgttaggtctt

SEQ ID NO: 72284 - DNA, 20 bp, synthetic construct
  misc_feature 1..20: note = Description of Artificial Sequence: Synthetic oligonucleotide
  misc_feature 1..20: note = Target: SCN10A; (+) strand; PAM type: YTN; PAM sequence: TTT
  source 1..20: mol_type = other DNA
tctagttttgttaggtcttt

SEQ ID NO: 72285 - DNA, 20 bp, synthetic construct
  misc_feature 1..20: note = Description of Artificial Sequence: Synthetic oligonucleotide
  misc_feature 1..20: note = Target: SCN10A; (+) strand; PAM type: YTN; PAM sequence: TTT
  source 1..20: mol_type = other DNA
ctagttttgttaggtcttta

SEQ ID NO: 72286 - DNA, 20 bp, synthetic construct
  misc_feature 1..20: note = Description of Artificial Sequence: Synthetic oligonucleotide
  misc_feature 1..20: note = Target: SCN10A; (+) strand; PAM type: YTN; PAM sequence: TTC
  source 1..20: mol_type = other DNA
tagttttgttaggtctttaa

SEQ ID NO: 72287 - DNA, 20 bp, synthetic construct
  misc_feature 1..20: note = Description of Artificial Sequence: Synthetic oligonucleotide
  misc_feature 1..20: note = Target: SCN10A; (+) strand; PAM type: YTN; PAM sequence: CTA
  source 1..20: mol_type = other DNA
gttttgttaggtctttaaat

SEQ ID NO: 72288 - DNA, 20 bp, synthetic construct
  misc_feature 1..20: note = Description of Artificial Sequence: Synthetic oligonucleotide
  misc_feature 1..20: note = Target: SCN10A; (+) strand; PAM type: YTN; PAM sequence: TTT
  source 1..20: mol_type = other DNA
tgttaggtctttaaataatt

SEQ ID NO: 72289 - DNA, 20 bp, synthetic construct
  misc_feature 1..20: note = Description of Artificial Sequence: Synthetic oligonucleotide
  misc_feature 1..20: note = Target: SCN10A; (+) strand; PAM type: YTN; PAM sequence: TTT
  source 1..20: mol_type = other DNA
gttaggtctttaaataattt

SEQ ID NO: 72290 - DNA, 20 bp, synthetic construct
  misc_feature 1..20: note = Description of Artificial Sequence: Synthetic oligonucleotide
  misc_feature 1..20: note = Target: SCN10A; (+) strand; PAM type: YTN; PAM sequence: TTG
  source 1..20: mol_type = other DNA
ttaggtctttaaataatttc

SEQ ID NO: 72291 - DNA, 20 bp, synthetic construct
  misc_feature 1..20: note = Description of Artificial Sequence: Synthetic oligonucleotide
  misc_feature 1..20: note = Target: SCN10A; (+) strand; PAM type: YTN; PAM sequence: TTA
  source 1..20: mol_type = other DNA
ggtctttaaataatttcttt

SEQ ID NO: 72292 - DNA, 20 bp, synthetic construct
  misc_feature 1..20: note = Description of Artificial Sequence: Synthetic oligonucleotide
  misc_feature 1..20: note = Target: SCN10A; (+) strand; PAM type: YTN; PAM sequence: CTT
  source 1..20: mol_type = other DNA
taaataatttcttttcagct

SEQ ID NO: 72293 - DNA, 20 bp, synthetic construct
  misc_feature 1..20: note = Description of Artificial Sequence: Synthetic oligonucleotide
  misc_feature 1..20: note = Target: SCN10A; (+) strand; PAM type: YTN; PAM sequence: TTT
  source 1..20: mol_type = other DNA
aaataatttcttttcagctt

SEQ ID NO: 72294 - DNA, 20 bp, synthetic construct
  misc_feature 1..20: note = Description of Artificial Sequence: Synthetic oligonucleotide
  misc_feature 1..20: note = Target: SCN10A; (+) strand; PAM type: YTN; PAM sequence: TTA
  source 1..20: mol_type = other DNA
aataatttcttttcagcttt

SEQ ID NO: 72295 - DNA, 20 bp, synthetic construct
  misc_feature 1..20: note = Description of Artificial Sequence: Synthetic oligonucleotide
  misc_feature 1..20: note = Target: SCN10A; (+) strand; PAM type: YTN; PAM sequence: TTT
  source 1..20: mol_type = other DNA
cttttcagcttttactgata

SEQ ID NO: 72296 - DNA, 20 bp, synthetic construct
  misc_feature 1..20: note = Description of Artificial Sequence: Synthetic oligonucleotide
  misc_feature 1..20: note = Target: SCN10A; (+) strand; PAM type: YTN; PAM sequence: TTC
  source 1..20: mol_type = other DNA
ttttcagcttttactgatat

SEQ ID NO: 72297 - DNA, 20 bp, synthetic construct
  misc_feature 1..20: note = Description of Artificial Sequence: Synthetic oligonucleotide
  misc_feature 1..20: note = Target: SCN10A; (+) strand; PAM type: YTN; PAM sequence: CTT
  source 1..20: mol_type = other DNA
ttcagcttttactgatataa

SEQ ID NO: 72298 - DNA, 20 bp, synthetic construct
  misc_feature 1..20: note = Description of Artificial Sequence: Synthetic oligonucleotide
  misc_feature 1..20: note = Target: SCN10A; (+) strand; PAM type: YTN; PAM sequence: TTT
  source 1..20: mol_type = other DNA
tcagcttttactgatataaa

SEQ ID NO: 72299 - DNA, 20 bp, synthetic construct
  misc_feature 1..20: note = Description of Artificial Sequence: Synthetic oligonucleotide
  misc_feature 1..20: note = Target: SCN10A; (+) strand; PAM type: YTN; PAM sequence: TTT
  source 1..20: mol_type = other DNA
cagcttttactgatataaat

SEQ ID NO: 72300 - DNA, 20 bp, synthetic construct
  misc_feature 1..20: note = Description of Artificial Sequence: Synthetic oligonucleotide
  misc_feature 1..20: note = Target: SCN10A; (+) strand; PAM type: YTN; PAM sequence: TTC
  source 1..20: mol_type = other DNA
agcttttactgatataaata

SEQ ID NO: 72301 - DNA, 20 bp, synthetic construct
  misc_feature 1..20: note = Description of Artificial Sequence: Synthetic oligonucleotide
  misc_feature 1..20: note = Target: SCN10A; (+) strand; PAM type: YTN; PAM sequence: CTT
  source 1..20: mol_type = other DNA
ttactgatataaatattcta

SEQ ID NO: 72302 - DNA, 20 bp, synthetic construct
  misc_feature 1..20: note = Description of Artificial Sequence: Synthetic oligonucleotide
  misc_feature 1..20: note = Target: SCN10A; (+) strand; PAM type: YTN; PAM sequence: TTT
  source 1..20: mol_type = other DNA
tactgatataaatattctat

SEQ ID NO: 72303 - DNA, 20 bp, synthetic construct
  misc_feature 1..20: note = Description of Artificial Sequence: Synthetic oligonucleotide
  misc_feature 1..20: note = Target: SCN10A; (+) strand; PAM type: YTN; PAM sequence: TTT
  source 1..20: mol_type = other DNA
actgatataaatattctatg

SEQ ID NO: 72304 - DNA, 20 bp, synthetic construct
  misc_feature 1..20: note = Description of Artificial Sequence: Synthetic oligonucleotide
  misc_feature 1..20: note = Target: SCN10A; (+) strand; PAM type: YTN; PAM sequence: TTA
  source 1..20: mol_type = other DNA
ctgatataaatattctatgc

SEQ ID NO: 72305 - DNA, 20 bp, synthetic construct
  misc_feature 1..20: note = Description of Artificial Sequence: Synthetic oligonucleotide
  misc_feature 1..20: note = Target: SCN10A; (+) strand; PAM type: YTN; PAM sequence: CTG
  source 1..20: mol_type = other DNA
atataaatattctatgcttc

SEQ ID NO: 72306 - DNA, 20 bp, synthetic construct
  misc_feature 1..20: note = Description of Artificial Sequence: Synthetic oligonucleotide
  misc_feature 1..20: note = Target: SCN10A; (+) strand; PAM type: YTN; PAM sequence: TTC
  source 1..20: mol_type = other DNA
tatgcttccatgctgtgact

SEQ ID NO: 72307 - DNA, 20 bp, synthetic construct
  misc_feature 1..20: note = Description of Artificial Sequence: Synthetic oligonucleotide
  misc_feature 1..20: note = Target: SCN10A; (+) strand; PAM type: YTN; PAM sequence: CTA
  source 1..20: mol_type = other DNA
tgcttccatgctgtgactta

SEQ ID NO: 72308 - DNA, 20 bp, synthetic construct
  misc_feature 1..20: note = Description of Artificial Sequence: Synthetic oligonucleotide
  misc_feature 1..20: note = Target: SCN10A; (+) strand; PAM type: YTN; PAM sequence: CTT
  source 1..20: mol_type = other DNA
ccatgctgtgacttattccc

SEQ ID NO: 72309 - DNA, 20 bp, synthetic construct
  misc_feature 1..20: note = Description of Artificial Sequence: Synthetic oligonucleotide
  misc_feature 1..20: note = Target: SCN10A; (+) strand; PAM type: YTN; PAM sequence: TTC
  source 1..20: mol_type = other DNA
catgctgtgacttattccct

SEQ ID NO: 72310 - DNA, 20 bp, synthetic construct
  misc_feature 1..20: note = Description of Artificial Sequence: Synthetic oligonucleotide
  misc_feature 1..20: note = Target: SCN10A; (+) strand; PAM type: YTN; PAM sequence: CTG
  source 1..20: mol_type = other DNA
tgacttattccctgaatatg

SEQ ID NO: 72311 - DNA, 20 bp, synthetic construct
  misc_feature 1..20: note = Description of Artificial Sequence: Synthetic oligonucleotide
  misc_feature 1..20: note = Target: SCN10A; (+) strand; PAM type: YTN; PAM sequence: CTT
  source 1..20: mol_type = other DNA
attccctgaatatgtatgtc

SEQ ID NO: 72312 - DNA, 20 bp, synthetic construct
  misc_feature 1..20: note = Description of Artificial Sequence: Synthetic oligonucleotide
  misc_feature 1..20: note = Target: SCN10A; (+) strand; PAM type: YTN; PAM sequence: TTA
  source 1..20: mol_type = other DNA
ttccctgaatatgtatgtct

SEQ ID NO: 72313 - DNA, 20 bp, synthetic construct
  misc_feature 1..20: note = Description of Artificial Sequence: Synthetic oligonucleotide
  misc_feature 1..20: note = Target: SCN10A; (+) strand; PAM type: YTN; PAM sequence: TTC
  source 1..20: mol_type = other DNA
cctgaatatgtatgtcttta

SEQ ID NO: 72314 - DNA, 20 bp, synthetic construct
  misc_feature 1..20: note = Description of Artificial Sequence: Synthetic oligonucleotide
  misc_feature 1..20: note = Target: SCN10A; (+) strand; PAM type: YTN; PAM sequence: CTG
  source 1..20: mol_type = other DNA
aatatgtatgtctttaactg

SEQ ID NO: 72315 - DNA, 20 bp, synthetic construct
  misc_feature 1..20: note = Description of Artificial Sequence: Synthetic oligonucleotide
  misc_feature 1..20: note = Target: SCN10A; (+) strand; PAM type: YTN; PAM sequence: CTT
  source 1..20: mol_type = other DNA
taactgcactctctaggttc

SEQ ID NO: 72316 - DNA, 20 bp, synthetic construct
  misc_feature 1..20: note = Description of Artificial Sequence: Synthetic oligonucleotide
  misc_feature 1..20: note = Target: SCN10A; (+) strand; PAM type: YTN; PAM sequence: TTT
  source 1..20: mol_type = other DNA
aactgcactctctaggttct

SEQ ID NO: 72317 - DNA, 20 bp, synthetic construct
  misc_feature 1..20: note = Description of Artificial Sequence: Synthetic oligonucleotide
  misc_feature 1..20: note = Target: SCN10A; (+) strand; PAM type: YTN; PAM sequence: TTA
  source 1..20: mol_type = other DNA
actgcactctctaggttctg

SEQ ID NO: 72318 - DNA, 20 bp, synthetic construct
  misc_feature 1..20: note = Description of Artificial Sequence: Synthetic oligonucleotide
  misc_feature 1..20: note = Target: SCN10A; (+) strand; PAM type: YTN; PAM sequence: CTG
  source 1..20: mol_type = other DNA
cactctctaggttctgatta

SEQ ID NO: 72319 - DNA, 20 bp, synthetic construct
  misc_feature 1..20: note = Description of Artificial Sequence: Synthetic oligonucleotide
  misc_feature 1..20: note = Target: SCN10A; (+) strand; PAM type: YTN; PAM sequence: CTC
  source 1..20: mol_type = other DNA
tctaggttctgattaaactg

SEQ ID NO: 72320 - DNA, 20 bp, synthetic construct
  misc_feature 1..20: note = Description of Artificial Sequence: Synthetic oligonucleotide
  misc_feature 1..20: note = Target: SCN10A; (+) strand; PAM type: YTN; PAM sequence: CTC
  source 1..20: mol_type = other DNA
taggttctgattaaactgtt

SEQ ID NO: 72321 - DNA, 20 bp, synthetic construct
  misc_feature 1..20: note = Description of Artificial Sequence: Synthetic oligonucleotide
  misc_feature 1..20: note = Target: SCN10A; (+) strand; PAM type: YTN; PAM sequence: CTA
  source 1..20: mol_type = other DNA
ggttctgattaaactgtttt

SEQ ID NO: 72322 - DNA, 20 bp, synthetic construct
  misc_feature 1..20: note = Description of Artificial Sequence: Synthetic oligonucleotide
  misc_feature 1..20: note = Target: SCN10A; (+) strand; PAM type: YTN; PAM sequence: TTC
  source 1..20: mol_type = other DNA
tgattaaactgttttttatc

SEQ ID NO: 72323 - DNA, 20 bp, synthetic construct
  misc_feature 1..20: note = Description of Artificial Sequence: Synthetic oligonucleotide
  misc_feature 1..20: note = Target: SCN10A; (+) strand; PAM type: YTN; PAM sequence: CTG
  source 1..20: mol_type = other DNA
attaaactgttttttatctt

SEQ ID NO: 72324 - DNA, 20 bp, synthetic construct
  misc_feature 1..20: note = Description of Artificial Sequence: Synthetic oligonucleotide
  misc_feature 1..20: note = Target: SCN10A; (+) strand; PAM type: YTN; PAM sequence: TTA
  source 1..20: mol_type = other DNA
aactgttttttatctttcct

SEQ ID NO: 72325 - DNA, 20 bp, synthetic construct
  misc_feature 1..20: note = Description of Artificial Sequence: Synthetic oligonucleotide
  misc_feature 1..20: note = Target: SCN10A; (+) strand; PAM type: YTN; PAM sequence: CTG
  source 1..20: mol_type = other DNA
ttttttatctttccttccct

SEQ ID NO: 72326 - DNA, 20 bp, synthetic construct
  misc_feature 1..20: note = Description of Artificial Sequence: Synthetic oligonucleotide
  misc_feature 1..20: note = Target: SCN10A; (+) strand; PAM type: YTN; PAM sequence: TTT
  source 1..20: mol_type = other DNA
tttatctttccttccctcga

SEQ ID NO: 72327 - DNA, 20 bp, synthetic construct
  misc_feature 1..20: note = Description of Artificial Sequence: Synthetic oligonucleotide
  misc_feature 1..20: note = Target: SCN10A; (+) strand; PAM type: YTN; PAM sequence: TTT
  source 1..20: mol_type = other DNA
ttatctttccttccctcgaa

SEQ ID NO: 72328 - DNA, 20 bp, synthetic construct
  misc_feature 1..20: note = Description of Artificial Sequence: Synthetic oligonucleotide
  misc_feature 1..20: note = Target: SCN10A; (+) strand; PAM type: YTN; PAM sequence: TTT
  source 1..20: mol_type = other DNA
tatctttccttccctcgaaa

SEQ ID NO: 72329 - DNA, 20 bp, synthetic construct
  misc_feature 1..20: note = Description of Artificial Sequence: Synthetic oligonucleotide
  misc_feature 1..20: note = Target: SCN10A; (+) strand; PAM type: YTN; PAM sequence: TTT
  source 1..20: mol_type = other DNA
atctttccttccctcgaaat

SEQ ID NO: 72330 - DNA, 20 bp, synthetic construct
  misc_feature 1..20: note = Description of Artificial Sequence: Synthetic oligonucleotide
  misc_feature 1..20: note = Target: SCN10A; (+) strand; PAM type: YTN; PAM sequence: TTA
  source 1..20: mol_type = other DNA
tctttccttccctcgaaatt

SEQ ID NO: 72331 - DNA, 20 bp, synthetic construct
  misc_feature 1..20: note = Description of Artificial Sequence: Synthetic oligonucleotide
  misc_feature 1..20: note = Target: SCN10A; (+) strand; PAM type: YTN; PAM sequence: CTT
  source 1..20: mol_type = other DNA
tccttccctcgaaattatat

SEQ ID NO: 72332 - DNA, 20 bp, synthetic construct
  misc_feature 1..20: note = Description of Artificial Sequence: Synthetic oligonucleotide
  misc_feature 1..20: note = Target: SCN10A; (+) strand; PAM type: YTN; PAM sequence: TTT
  source 1..20: mol_type = other DNA
ccttccctcgaaattatata

SEQ ID NO: 72333 - DNA, 20 bp, synthetic construct
  misc_feature 1..20: note = Description of Artificial Sequence: Synthetic oligonucleotide
  misc_feature 1..20: note = Target: SCN10A; (+) strand; PAM type: YTN; PAM sequence: TTC
  source 1..20: mol_type = other DNA
cttccctcgaaattatataa

SEQ ID NO: 72334 - DNA, 20 bp, synthetic construct
  misc_feature 1..20: note = Description of Artificial Sequence: Synthetic oligonucleotide
  misc_feature 1..20: note = Target: SCN10A; (+) strand; PAM type: YTN; PAM sequence: CTT
  source 1..20: mol_type = other DNA
ccctcgaaattatataattt

SEQ ID NO: 72335 - DNA, 20 bp, synthetic construct
  misc_feature 1..20: note = Description of Artificial Sequence: Synthetic oligonucleotide
  misc_feature 1..20: note = Target: SCN10A; (+) strand; PAM type: YTN; PAM sequence: TTC
  source 1..20: mol_type = other DNA
cctcgaaattatataatttt

SEQ ID NO: 72336 - DNA, 20 bp, synthetic construct
  misc_feature 1..20: note = Description of Artificial Sequence: Synthetic oligonucleotide
  misc_feature 1..20: note = Target: SCN10A; (+) strand; PAM type: YTN; PAM sequence: CTC
  source 1..20: mol_type = other DNA
gaaattatataattttagtt

SEQ ID NO: 72337 - DNA, 20 bp, synthetic construct
  misc_feature 1..20: note = Description of Artificial Sequence: Synthetic oligonucleotide
  misc_feature 1..20: note = Target: SCN10A; (+) strand; PAM type: YTN; PAM sequence: TTA
  source 1..20: mol_type = other DNA
tataattttagtttatagtt

SEQ ID NO: 72338 - DNA, 20 bp, synthetic construct
  misc_feature 1..20: note = Description of Artificial Sequence: Synthetic oligonucleotide
  misc_feature 1..20: note = Target: SCN10A; (+) strand; PAM type: YTN; PAM sequence: TTT
  source 1..20: mol_type = other DNA
tagtttatagtttgtctttt

SEQ ID NO: 72339 - DNA, 20 bp, synthetic construct
  misc_feature 1..20: note = Description of Artificial Sequence: Synthetic oligonucleotide
  misc_feature 1..20: note = Target: SCN10A; (+) strand; PAM type: YTN; PAM sequence: TTT
  source 1..20: mol_type = other DNA
agtttatagtttgtcttttg

SEQ ID NO: 72340 - DNA, 20 bp, synthetic construct
  misc_feature 1..20: note = Description of Artificial Sequence: Synthetic oligonucleotide
  misc_feature 1..20: note = Target: SCN10A; (+) strand; PAM type: YTN; PAM sequence: TTA
  source 1..20: mol_type = other DNA
gtttatagtttgtcttttgt

SEQ ID NO: 72341 - DNA, 20 bp, synthetic construct
  misc_feature 1..20: note = Description of Artificial Sequence: Synthetic oligonucleotide
  misc_feature 1..20: note = Target: SCN10A; (+) strand; PAM type: YTN; PAM sequence: TTT
  source 1..20: mol_type = other DNA
atagtttgtcttttgtccaa

SEQ ID NO: 72342 - DNA, 20 bp, synthetic construct
  misc_feature 1..20: note = Description of Artificial Sequence: Synthetic oligonucleotide
  misc_feature 1..20: note = Target: SCN10A; (+) strand; PAM type: YTN; PAM sequence: TTA
  source 1..20: mol_type = other DNA
tagtttgtcttttgtccaag

SEQ ID NO: 72343 - DNA, 20 bp, synthetic construct
  misc_feature 1..20: note = Description of Artificial Sequence: Synthetic oligonucleotide
  misc_feature 1..20: note = Target: SCN10A; (+) strand; PAM type: YTN; PAM sequence: TTT
  source 1..20: mol_type = other DNA
gtcttttgtccaagaattct

SEQ ID NO: 72344 - DNA, 20 bp, synthetic construct
  misc_feature 1..20: note = Description of Artificial Sequence: Synthetic oligonucleotide
  misc_feature 1..20: note = Target: SCN10A; (+) strand; PAM type: YTN; PAM sequence: TTG
  source 1..20: mol_type = other DNA
tcttttgtccaagaattctt

SEQ ID NO: 72345 - DNA, 20 bp, synthetic construct
  misc_feature 1..20: note = Description of Artificial Sequence: Synthetic oligonucleotide
  misc_feature 1..20: note = Target: SCN10A; (+) strand; PAM type: YTN; PAM sequence: CTT
  source 1..20: mol_type = other DNA
ttgtccaagaattctttaag

SEQ ID NO: 72346 - DNA, 20 bp, synthetic construct
  misc_feature 1..20: note = Description of Artificial Sequence: Synthetic oligonucleotide
  misc_feature 1..20: note = Target: SCN10A; (+) strand; PAM type: YTN; PAM sequence: TTT
  source 1..20: mol_type = other DNA
tgtccaagaattctttaaga

SEQ ID NO: 72347 - DNA, 20 bp, synthetic construct
  misc_feature 1..20: note = Description of Artificial Sequence: Synthetic oligonucleotide
  misc_feature 1..20: note = Target: SCN10A; (+) strand; PAM type: YTN; PAM sequence: TTT
  source 1..20: mol_type = other DNA
gtccaagaattctttaagag

SEQ ID NO: 72348 - DNA, 20 bp, synthetic construct
  misc_feature 1..20: note = Description of Artificial Sequence: Synthetic oligonucleotide
  misc_feature 1..20: note = Target: SCN10A; (+) strand; PAM type: YTN; PAM sequence: TTG
  source 1..20: mol_type = other DNA
tccaagaattctttaagaga

SEQ ID NO: 72349 - DNA, 20 bp, synthetic construct
  misc_feature 1..20: note = Description of Artificial Sequence: Synthetic oligonucleotide
  misc_feature 1..20: note = Target: SCN10A; (+) strand; PAM type: YTN; PAM sequence: TTC
  source 1..20: mol_type = other DNA
tttaagagagatttttaaaa

SEQ ID NO: 72350 - DNA, 20 bp, synthetic construct
  misc_feature 1..20: note = Description of Artificial Sequence: Synthetic oligonucleotide
  misc_feature 1..20: note = Target: SCN10A; (+) strand; PAM type: YTN; PAM sequence: CTT
  source 1..20: mol_type = other DNA
taagagagatttttaaaaat

SEQ ID NO: 72351 - DNA, 20 bp, synthetic construct
  misc_feature 1..20: note = Description of Artificial Sequence: Synthetic oligonucleotide
  misc_feature 1..20: note = Target: SCN10A; (+) strand; PAM type: YTN; PAM sequence: TTT
  source 1..20: mol_type = other DNA
aagagagatttttaaaaatt

SEQ ID NO: 72352 - DNA, 20 bp, synthetic construct
  misc_feature 1..20: note = Description of Artificial Sequence: Synthetic oligonucleotide
  misc_feature 1..20: note = Target: SCN10A; (+) strand; PAM type: YTN; PAM sequence: TTA
  source 1..20: mol_type = other DNA
agagagatttttaaaaatta

SEQ ID NO: 72353 - DNA, 20 bp, synthetic construct
  misc_feature 1..20: note = Description of Artificial Sequence: Synthetic oligonucleotide
  misc_feature 1..20: note = Target: SCN10A; (+) strand; PAM type: YTN; PAM sequence: TTT
  source 1..20: mol_type = other DNA
ttaaaaattatcaagtggaa

SEQ ID NO: 72354 - DNA, 20 bp, synthetic construct
  misc_feature 1..20: note = Description of Artificial Sequence: Synthetic oligonucleotide
  misc_feature 1..20: note = Target: SCN10A; (+) strand; PAM type: YTN; PAM sequence: TTT
  source 1..20: mol_type = other DNA
taaaaattatcaagtggaaa

SEQ ID NO: 72355 - DNA, 20 bp, synthetic construct
  misc_feature 1..20: note = Description of Artificial Sequence: Synthetic oligonucleotide
  misc_feature 1..20: note = Target: SCN10A; (+) strand; PAM type: YTN; PAM sequence: TTT
  source 1..20: mol_type = other DNA
aaaaattatcaagtggaaag

SEQ ID NO: 72356 - DNA, 20 bp, synthetic construct
  misc_feature 1..20: note = Description of Artificial Sequence: Synthetic oligonucleotide
  misc_feature 1..20: note = Target: SCN10A; (+) strand; PAM type: YTN; PAM sequence: TTA
  source 1..20: mol_type = other DNA
aaaattatcaagtggaaagt

SEQ ID NO: 72357 - DNA, 20 bp, synthetic construct
  misc_feature 1..20: note = Description of Artificial Sequence: Synthetic oligonucleotide
  misc_feature 1..20: note = Target: SCN10A; (+) strand; PAM type: YTN; PAM sequence: TTA
  source 1..20: mol_type = other DNA
tcaagtggaaagtcctctca

SEQ ID NO: 72358 - DNA, 20 bp, synthetic construct
  misc_feature 1..20: note = Description of Artificial Sequence: Synthetic oligonucleotide
  misc_feature 1..20: note = Target: SCN10A; (+) strand; PAM type: YTN; PAM sequence: CTC
  source 1..20: mol_type = other DNA
tcatttcattaaatttggtt

SEQ ID NO: 72359 - DNA, 20 bp, synthetic construct
  misc_feature 1..20: note = Description of Artificial Sequence: Synthetic oligonucleotide
  misc_feature 1..20: note = Target: SCN10A; (+) strand; PAM type: YTN; PAM sequence: CTC
  source 1..20: mol_type = other DNA
atttcattaaatttggttat

SEQ ID NO: 72360 - DNA, 20 bp, synthetic construct
  misc_feature 1..20: note = Description of Artificial Sequence: Synthetic oligonucleotide
  misc_feature 1..20: note = Target: SCN10A; (+) strand; PAM type: YTN; PAM sequence: TTT
  source 1..20: mol_type = other DNA
cattaaatttggttattttt

SEQ ID NO: 72361 - DNA, 20 bp, synthetic construct
  misc_feature 1..20: note = Description of Artificial Sequence: Synthetic oligonucleotide
  misc_feature 1..20: note = Target: SCN10A; (+) strand; PAM type: YTN; PAM sequence: TTC
  source 1..20: mol_type = other DNA
attaaatttggttatttttt

SEQ ID NO: 72362 - DNA, 20 bp, synthetic construct
  misc_feature 1..20: note = Description of Artificial Sequence: Synthetic oligonucleotide
  misc_feature 1..20: note = Target: SCN10A; (+) strand; PAM type: YTN; PAM sequence: TTA
  source 1..20: mol_type = other DNA
aatttggttattttttttaa

SEQ ID NO: 72363 - DNA, 20 bp, synthetic construct
  misc_feature 1..20: note = Description of Artificial Sequence: Synthetic oligonucleotide
  misc_feature 1..20: note = Target: SCN10A; (+) strand; PAM type: YTN; PAM sequence: TTT
  source 1..20: mol_type = other DNA
ggttattttttttaactcta

SEQ ID NO: 72364 - DNA, 20 bp, synthetic construct
  misc_feature 1..20: note = Description of Artificial Sequence: Synthetic oligonucleotide
  misc_feature 1..20: note = Target: SCN10A; (+) strand; PAM type: YTN; PAM sequence: TTG
  source 1..20: mol_type = other DNA
gttattttttttaactctat

SEQ ID NO: 72365 - DNA, 20 bp, synthetic construct
  misc_feature 1..20: note = Description of Artificial Sequence: Synthetic oligonucleotide
  misc_feature 1..20: note = Target: SCN10A; (+) strand; PAM type: YTN; PAM sequence: TTA
  source 1..20: mol_type = other DNA
ttttttttaactctatttca

SEQ ID NO: 72366 - DNA, 20 bp, synthetic construct
  misc_feature 1..20: note = Description of Artificial Sequence: Synthetic oligonucleotide
  misc_feature 1..20: note = Target: SCN10A; (+) strand; PAM type: YTN; PAM sequence: TTT
  source 1..20: mol_type = other DNA
tttttaactctatttcatta

SEQ ID NO: 72367 - DNA, 20 bp, synthetic construct
  misc_feature 1..20: note = Description of Artificial Sequence: Synthetic oligonucleotide
  misc_feature 1..20: note = Target: SCN10A; (+) strand; PAM type: YTN; PAM sequence: TTT
  source 1..20: mol_type = other DNA
ttttaactctatttcattat

SEQ ID NO: 72368 - DNA, 20 bp, synthetic construct
  misc_feature 1..20: note = Description of Artificial Sequence: Synthetic oligonucleotide
  misc_feature 1..20: note = Target: SCN10A; (+) strand; PAM type: YTN; PAM sequence: TTT
  source 1..20: mol_type = other DNA
tttaactctatttcattatg

SEQ ID NO: 72369 - DNA, 20 bp, synthetic construct
  misc_feature 1..20: note = Description of Artificial Sequence: Synthetic oligonucleotide
  misc_feature 1..20: note = Target: SCN10A; (+) strand; PAM type: YTN; PAM sequence: TTT
  source 1..20: mol_type = other DNA
ttaactctatttcattatga

SEQ ID NO: 72370 - DNA, 20 bp, synthetic construct
  misc_feature 1..20: note = Description of Artificial Sequence: Synthetic oligonucleotide
  misc_feature 1..20: note = Target: SCN10A; (+) strand; PAM type: YTN; PAM sequence: TTT
  source 1..20: mol_type = other DNA
taactctatttcattatgat

SEQ ID NO: 72371 - DNA, 20 bp, synthetic construct
  misc_feature 1..20: note = Description of Artificial Sequence: Synthetic oligonucleotide
  misc_feature 1..20: note = Target: SCN10A; (+) strand; PAM type: YTN; PAM sequence: TTT
  source 1..20: mol_type = other DNA
aactctatttcattatgatc

SEQ ID NO: 72372 - DNA, 20 bp, synthetic construct
  misc_feature 1..20: note = Description of Artificial Sequence: Synthetic oligonucleotide
  misc_feature 1..20: note = Target: SCN10A; (+) strand; PAM type: YTN; PAM sequence: TTA
  source 1..20: mol_type = other DNA
actctatttcattatgatca

SEQ ID NO: 72373 - DNA, 20 bp, synthetic construct
  misc_feature 1..20: note = Description of Artificial Sequence: Synthetic oligonucleotide
  misc_feature 1..20: note = Target: SCN10A; (+) strand; PAM type: YTN; PAM sequence: CTC
  source 1..20: mol_type = other DNA
tatttcattatgatcagaga

SEQ ID NO: 72374 - DNA, 20 bp, synthetic construct
  misc_feature 1..20: note = Description of Artificial Sequence: Synthetic oligonucleotide
  misc_feature 1..20: note = Target: SCN10A; (+) strand; PAM type: YTN; PAM sequence: CTA
  source 1..20: mol_type = other DNA
tttcattatgatcagagaat

SEQ ID NO: 72375 - DNA, 20 bp, synthetic construct
  misc_feature 1..20: note = Description of Artificial Sequence: Synthetic oligonucleotide
  misc_feature 1..20: note = Target: SCN10A; (+) strand; PAM type: YTN; PAM sequence: TTT
  source 1..20: mol_type = other DNA
cattatgatcagagaatgtt

SEQ ID NO: 72376 - DNA, 20 bp, synthetic construct
  misc_feature 1..20: note = Description of Artificial Sequence: Synthetic oligonucleotide
  misc_feature 1..20: note = Target: SCN10A; (+) strand; PAM type: YTN; PAM sequence: TTC
  source 1..20: mol_type = other DNA
attatgatcagagaatgttt

SEQ ID NO: 72377 - DNA, 20 bp, synthetic construct
  misc_feature 1..20: note = Description of Artificial Sequence: Synthetic oligonucleotide
  misc_feature 1..20: note = Target: SCN10A; (+) strand; PAM type: YTN; PAM sequence: TTA
  source 1..20: mol_type = other DNA
tgatcagagaatgttttcta

SEQ ID NO: 72378 - DNA, 20 bp, synthetic construct
  misc_feature 1..20: note = Description of Artificial Sequence: Synthetic oligonucleotide
  misc_feature 1..20: note = Target: SCN10A; (+) strand; PAM type: YTN; PAM sequence: TTT
  source 1..20: mol_type = other DNA
tctatattatttccactttc

SEQ ID NO: 72379 - DNA, 20 bp, synthetic construct
  misc_feature 1..20: note = Description of Artificial Sequence: Synthetic oligonucleotide
  misc_feature 1..20: note = Target: SCN10A; (+) strand; PAM type: YTN; PAM sequence: TTT
  source 1..20: mol_type = other DNA
ctatattatttccactttct

SEQ ID NO: 72380 - DNA, 20 bp, synthetic construct
  misc_feature 1..20: note = Description of Artificial Sequence: Synthetic oligonucleotide
  misc_feature 1..20: note = Target: SCN10A; (+) strand; PAM type: YTN; PAM sequence: TTC
  source 1..20: mol_type = other DNA
tatattatttccactttctg

SEQ ID NO: 72381 - DNA, 20 bp, synthetic construct
  misc_feature 1..20: note = Description of Artificial Sequence: Synthetic oligonucleotide
  misc_feature 1..20: note = Target: SCN10A; (+) strand; PAM type: YTN; PAM sequence: CTA
  source 1..20: mol_type = other DNA
tattatttccactttctgga

SEQ ID NO: 72382 - DNA, 20 bp, synthetic construct
  misc_feature 1..20: note = Description of Artificial Sequence: Synthetic oligonucleotide
  misc_feature 1..20: note = Target: SCN10A; (+) strand; PAM type: YTN; PAM sequence: TTA
  source 1..20: mol_type = other DNA
tttccactttctggagctta

SEQ ID NO: 72383 - DNA, 20 bp, synthetic construct
  misc_feature 1..20: note = Description of Artificial Sequence: Synthetic oligonucleotide
  misc_feature 1..20: note = Target: SCN10A; (+) strand; PAM type: YTN; PAM sequence: TTT
  source 1..20: mol_type = other DNA
ccactttctggagcttattg

SEQ ID NO: 72384 - DNA, 20 bp, synthetic construct
  misc_feature 1..20: note = Description of Artificial Sequence: Synthetic oligonucleotide
  misc_feature 1..20: note = Target: SCN10A; (+) strand; PAM type: YTN; PAM sequence: TTC
  source 1..20: mol_type = other DNA
cactttctggagcttattga

SEQ ID NO: 72385 - DNA, 20 bp, synthetic construct
  misc_feature 1..20: note = Description of Artificial Sequence: Synthetic oligonucleotide
  misc_feature 1..20: note = Target: SCN10A; (+) strand; PAM type: YTN; PAM sequence: CTT
  source 1..20: mol_type = other DNA
tctggagcttattgaggttt

SEQ ID NO: 72386 - DNA, 20 bp, synthetic construct
  misc_feature 1..20: note = Description of Artificial Sequence: Synthetic oligonucleotide
  misc_feature 1..20: note = Target: SCN10A; (+) strand; PAM type: YTN; PAM sequence: TTT
  source 1..20: mol_type = other DNA
ctggagcttattgaggtttt

SEQ ID NO: 72387 - DNA, 20 bp, synthetic construct
  misc_feature 1..20: note = Description of Artificial Sequence: Synthetic oligonucleotide
  misc_feature 1..20: note = Target: SCN10A; (+) strand; PAM type: YTN; PAM sequence: TTC
  source 1..20: mol_type = other DNA
tggagcttattgaggttttt

SEQ ID NO: 72388 - DNA, 20 bp, synthetic construct
  misc_feature 1..20: note = Description of Artificial Sequence: Synthetic oligonucleotide
  misc_feature 1..20: note = Target: SCN10A; (+) strand; PAM type: YTN; PAM sequence: CTG
  source 1..20: mol_type = other DNA
gagcttattgaggtttttgt

SEQ ID NO: 72389 - DNA, 20 bp, synthetic construct
  misc_feature 1..20: note = Description of Artificial Sequence: Synthetic oligonucleotide
  misc_feature 1..20: note = Target: SCN10A; (+) strand; PAM type: YTN; PAM sequence: CTT
  source 1..20: mol_type = other DNA
attgaggtttttgtcatggc

SEQ ID NO: 72390 - DNA, 20 bp, synthetic construct
  misc_feature 1..20: note = Description of Artificial Sequence: Synthetic oligonucleotide
  misc_feature 1..20: note = Target: SCN10A; (+) strand; PAM type: YTN; PAM sequence: TTA
  source 1..20: mol_type = other DNA
ttgaggtttttgtcatggct

SEQ ID NO: 72391 - DNA, 20 bp, synthetic construct
  misc_feature 1..20: note = Description of Artificial Sequence: Synthetic oligonucleotide
  misc_feature 1..20: note = Target: SCN10A; (+) strand; PAM type: YTN; PAM sequence: TTG
  source 1..20: mol_type = other DNA
aggtttttgtcatggcttaa

SEQ ID NO: 72392 - DNA, 20 bp, synthetic construct
  misc_feature 1..20: note = Description of Artificial Sequence: Synthetic oligonucleotide
  misc_feature 1..20: note = Target: SCN10A; (+) strand; PAM type: YTN; PAM sequence: TTT
  source 1..20: mol_type = other DNA
ttgtcatggcttaatatttg

SEQ ID NO: 72393 - DNA, 20 bp, synthetic construct
  misc_feature 1..20: note = Description of Artificial Sequence: Synthetic oligonucleotide
  misc_feature 1..20: note = Target: SCN10A; (+) strand; PAM type: YTN; PAM sequence: TTT
  source 1..20: mol_type = other DNA
tgtcatggcttaatatttgg

SEQ ID NO: 72394 - DNA, 20 bp, synthetic construct
  misc_feature 1..20: note = Description of Artificial Sequence: Synthetic oligonucleotide
  misc_feature 1..20: note = Target: SCN10A; (+) strand; PAM type: YTN; PAM sequence: TTT
  source 1..20: mol_type = other DNA
gtcatggcttaatatttggt

SEQ ID NO: 72395 - DNA, 20 bp, synthetic construct
  misc_feature 1..20: note = Description of Artificial Sequence: Synthetic oligonucleotide
  misc_feature 1..20: note = Target: SCN10A; (+) strand; PAM type: YTN; PAM sequence: TTG
  source 1..20: mol_type = other DNA
tcatggcttaatatttggtt

SEQ ID NO: 72396 - DNA, 20 bp, synthetic construct
  misc_feature 1..20: note = Description of Artificial Sequence: Synthetic oligonucleotide
  misc_feature 1..20: note = Target: SCN10A; (+) strand; PAM type: YTN; PAM sequence: CTT
  source 1..20: mol_type = other DNA
aatatttggtttgatatgtt

SEQ ID NO: 72397 - DNA, 20 bp, synthetic construct
  misc_feature 1..20: note = Description of Artificial Sequence: Synthetic oligonucleotide
  misc_feature 1..20: note = Target: SCN10A; (+) strand; PAM type: YTN; PAM sequence: TTA
  source 1..20: mol_type = other DNA
atatttggtttgatatgttt

SEQ ID NO: 72398 - DNA, 20 bp, synthetic construct
  misc_feature 1..20: note = Description of Artificial Sequence: Synthetic oligonucleotide
  misc_feature 1..20: note = Target: SCN10A; (+) strand; PAM type: YTN; PAM sequence: TTT
  source 1..20: mol_type = other DNA
ggtttgatatgtttggtttt

SEQ ID NO: 72399 - DNA, 20 bp, synthetic construct
  misc_feature 1..20: note = Description of Artificial Sequence: Synthetic oligonucleotide
  misc_feature 1..20: note = Target: SCN10A; (+) strand; PAM type: YTN; PAM sequence: TTG
  source 1..20: mol_type = other DNA
gtttgatatgtttggttttt

SEQ ID NO: 72400 - DNA, 20 bp, synthetic construct
  misc_feature 1..20: note = Description of Artificial Sequence: Synthetic oligonucleotide
  misc_feature 1..20: note = Target: SCN10A; (+) strand; PAM type: YTN; PAM sequence: TTT
  source 1..20: mol_type = other DNA
gatatgtttggttttttgaa

SEQ ID NO: 72401 - DNA, 20 bp, synthetic construct
  misc_feature 1..20: note = Description of Artificial Sequence: Synthetic oligonucleotide
  misc_feature 1..20: note = Target: SCN10A; (+) strand; PAM type: YTN; PAM sequence: TTG
  source 1..20: mol_type = other DNA
atatgtttggttttttgaaa

SEQ ID NO: 72402 - DNA, 20 bp, synthetic construct
  misc_feature 1..20: note = Description of Artificial Sequence: Synthetic oligonucleotide
  misc_feature 1..20: note = Target: SCN10A; (+) strand; PAM type: YTN; PAM sequence: TTT
  source 1..20: mol_type = other DNA
ggttttttgaaaaggaggtg

SEQ ID NO: 72403 - DNA, 20 bp, synthetic construct
  misc_feature 1..20: note = Description of Artificial Sequence: Synthetic oligonucleotide
  misc_feature 1..20: note = Target: SCN10A; (+) strand; PAM type: YTN; PAM sequence: TTG
  source 1..20: mol_type = other DNA
gttttttgaaaaggaggtgc

SEQ ID NO: 72404 - DNA, 20 bp, synthetic construct
  misc_feature 1..20: note = Description of Artificial Sequence: Synthetic oligonucleotide
  misc_feature 1..20: note = Target: SCN10A; (+) strand; PAM type: YTN; PAM sequence: TTT
  source 1..20: mol_type = other DNA
tttgaaaaggaggtgcattt

SEQ ID NO: 72405 - DNA, 20 bp, synthetic construct
  misc_feature 1..20: note = Description of Artificial Sequence: Synthetic oligonucleotide
  misc_feature 1..20: note = Target: SCN10A; (+) strand; PAM type: YTN; PAM sequence: TTT
  source 1..20: mol_type = other DNA
ttgaaaaggaggtgcatttt

SEQ ID NO: 72406 - DNA, 20 bp, synthetic construct
  misc_feature 1..20: note = Description of Artificial Sequence: Synthetic oligonucleotide
  misc_feature 1..20: note = Target: SCN10A; (+) strand; PAM type: YTN; PAM sequence: TTT
  source 1..20: mol_type = other DNA
tgaaaaggaggtgcattttc

SEQ ID NO: 72407 - DNA, 20 bp, synthetic construct
  misc_feature 1..20: note = Description of Artificial Sequence: Synthetic oligonucleotide
  misc_feature 1..20: note = Target: SCN10A; (+) strand; PAM type: YTN; PAM sequence: TTT
  source 1..20: mol_type = other DNA
gaaaaggaggtgcattttct

SEQ ID NO: 72408 - DNA, 20 bp, synthetic construct
  misc_feature 1..20: note = Description of Artificial Sequence: Synthetic oligonucleotide
  misc_feature 1..20: note = Target: SCN10A; (+) strand; PAM type: YTN; PAM sequence: TTG
  source 1..20: mol_type = other DNA
aaaaggaggtgcattttcta

SEQ ID NO: 72409 - DNA, 20 bp, synthetic construct
  misc_feature 1..20: note = Description of Artificial Sequence: Synthetic oligonucleotide
  misc_feature 1..20: note = Target: SCN10A; (+) strand; PAM type: YTN; PAM sequence: TTT
  source 1..20: mol_type = other DNA
tctattgttagggaaggtag

SEQ ID NO: 72410 - DNA, 20 bp, synthetic construct
  misc_feature 1..20: note = Description of Artificial Sequence: Synthetic oligonucleotide
  misc_feature 1..20: note = Target: SCN10A; (+) strand; PAM type: YTN; PAM sequence: TTT
  source 1..20: mol_type = other DNA
ctattgttagggaaggtagt

SEQ ID NO: 72411 - DNA, 20 bp, synthetic construct
  misc_feature 1..20: note = Description of Artificial Sequence: Synthetic oligonucleotide
  misc_feature 1..20: note = Target: SCN10A; (+) strand; PAM type: YTN; PAM sequence: TTC
  source 1..20: mol_type = other DNA
tattgttagggaaggtagtt

SEQ ID NO: 72412 - DNA, 20 bp, synthetic construct
  misc_feature 1..20: note = Description of Artificial Sequence: Synthetic oligonucleotide
  misc_feature 1..20: note = Target: SCN10A; (+) strand; PAM type: YTN; PAM sequence: CTA
  source 1..20: mol_type = other DNA
ttgttagggaaggtagtttg

SEQ ID NO: 72413 - DNA, 20 bp, synthetic construct
  misc_feature 1..20: note = Description of Artificial Sequence: Synthetic oligonucleotide
  misc_feature 1..20: note = Target: SCN10A; (+) strand; PAM type: YTN; PAM sequence: TTG
  source 1..20: mol_type = other DNA
ttagggaaggtagtttgcta

SEQ ID NO: 72414 - DNA, 20 bp, synthetic construct
  misc_feature 1..20: note = Description of Artificial Sequence: Synthetic oligonucleotide
  misc_feature 1..20: note = Target: SCN10A; (+) strand; PAM type: YTN; PAM sequence: TTA
  source 1..20: mol_type = other DNA
gggaaggtagtttgctatat

SEQ ID NO: 72415 - DNA, 20 bp, synthetic construct
  misc_feature 1..20: note = Description of Artificial Sequence: Synthetic oligonucleotide
  misc_feature 1..20: note = Target: SCN10A; (+) strand; PAM type: YTN; PAM sequence: TTT
  source 1..20: mol_type = other DNA
gctatatattaatcagatac

SEQ ID NO: 72416 - DNA, 20 bp, synthetic construct
  misc_feature 1..20: note = Description of Artificial Sequence: Synthetic oligonucleotide
  misc_feature 1..20: note = Target: SCN10A; (+) strand; PAM type: YTN; PAM sequence: TTG
  source 1..20: mol_type = other DNA
ctatatattaatcagataca

SEQ ID NO: 72417 - DNA, 20 bp, synthetic construct
  misc_feature 1..20: note = Description of Artificial Sequence: Synthetic oligonucleotide
  misc_feature 1..20: note = Target: SCN10A; (+) strand; PAM type: YTN; PAM sequence: CTA
  source 1..20: mol_type = other DNA
tatattaatcagatacatta

SEQ ID NO: 72418 - DNA, 20 bp, synthetic construct
  misc_feature 1..20: note = Description of Artificial Sequence: Synthetic oligonucleotide
  misc_feature 1..20: note = Target: SCN10A; (+) strand; PAM type: YTN; PAM sequence: TTA
  source 1..20: mol_type = other DNA
atcagatacattatattaat

SEQ ID NO: 72419 - DNA, 20 bp, synthetic construct
  misc_feature 1..20: note = Description of Artificial Sequence: Synthetic oligonucleotide
  misc_feature 1..20: note = Target: SCN10A; (+) strand; PAM type: YTN; PAM sequence: TTA
  source 1..20: mol_type = other DNA
tattaattatattactaggt

SEQ ID NO: 72420 - DNA, 20 bp, synthetic construct
  misc_feature 1..20: note = Description of Artificial Sequence: Synthetic oligonucleotide
  misc_feature 1..20: note = Target: SCN10A; (+) strand; PAM type: YTN; PAM sequence: TTA
  source 1..20: mol_type = other DNA
attatattactaggtcatct

SEQ ID NO: 72421 - DNA, 20 bp, synthetic construct
  misc_feature 1..20: note = Description of Artificial Sequence: Synthetic oligonucleotide
  misc_feature 1..20: note = Target: SCN10A; (+) strand; PAM type: YTN; PAM sequence: TTA
  source 1..20: mol_type = other DNA
tattactaggtcatctataa

SEQ ID NO: 72422 - DNA, 20 bp, synthetic construct
  misc_feature 1..20: note = Description of Artificial Sequence: Synthetic oligonucleotide
  misc_feature 1..20: note = Target: SCN10A; (+) strand; PAM type: YTN; PAM sequence: TTA
  source 1..20: mol_type = other DNA
ctaggtcatctataatttta

SEQ ID NO: 72423 - DNA, 20 bp, synthetic construct
  misc_feature 1..20: note = Description of Artificial Sequence: Synthetic oligonucleotide
  misc_feature 1..20: note = Target: SCN10A; (+) strand; PAM type: YTN; PAM sequence: CTA
  source 1..20: mol_type = other DNA
ggtcatctataattttacat

SEQ ID NO: 72424 - DNA, 20 bp, synthetic construct
  misc_feature 1..20: note = Description of Artificial Sequence: Synthetic oligonucleotide
  misc_feature 1..20: note = Target: SCN10A; (+) strand; PAM type: YTN; PAM sequence: CTA
  source 1..20: mol_type = other DNA
taattttacatactttttaa

SEQ ID NO: 72425 - DNA, 20 bp, synthetic construct
  misc_feature 1..20: note = Description of Artificial Sequence: Synthetic oligonucleotide
  misc_feature 1..20: note = Target: SCN10A; (+) strand; PAM type: YTN; PAM sequence: TTT
  source 1..20: mol_type = other DNA
tacatactttttaatacatt

SEQ ID NO: 72426 - DNA, 20 bp, synthetic construct
  misc_feature 1..20: note = Description of Artificial Sequence: Synthetic oligonucleotide
  misc_feature 1..20: note = Target: SCN10A; (+) strand; PAM type: YTN; PAM sequence: TTT
  source 1..20: mol_type = other DNA
acatactttttaatacattt

SEQ ID NO: 72427 - DNA, 20 bp, synthetic construct
  misc_feature 1..20: note = Description of Artificial Sequence: Synthetic oligonucleotide
  misc_feature 1..20: note = Target: SCN10A; (+) strand; PAM type: YTN; PAM sequence: TTA
  source 1..20: mol_type = other DNA
catactttttaatacatttg

SEQ ID NO: 72428 - DNA, 20 bp, synthetic construct
  misc_feature 1..20: note = Description of Artificial Sequence: Synthetic oligonucleotide
  misc_feature 1..20: note = Target: SCN10A; (+) strand; PAM type: YTN; PAM sequence: CTT
  source 1..20: mol_type = other DNA
tttaatacatttgatctgtt

SEQ ID NO: 72429 - DNA, 20 bp, synthetic construct
  misc_feature 1..20: note = Description of Artificial Sequence: Synthetic oligonucleotide
  misc_feature 1..20: note = Target: SCN10A; (+) strand; PAM type: YTN; PAM sequence: TTT
  source 1..20: mol_type = other DNA
ttaatacatttgatctgtta

SEQ ID NO: 72430 - DNA, 20 bp, synthetic construct
  misc_feature 1..20: note = Description of Artificial Sequence: Synthetic oligonucleotide
  misc_feature 1..20: note = Target: SCN10A; (+) strand; PAM type: YTN; PAM sequence: TTT
  source 1..20: mol_type = other DNA
taatacatttgatctgttat

SEQ ID NO: 72431 - DNA, 20 bp, synthetic construct
  misc_feature 1..20: note = Description of Artificial Sequence: Synthetic oligonucleotide
  misc_feature 1..20: note = Target: SCN10A; (+) strand; PAM type: YTN; PAM sequence: TTT
  source 1..20: mol_type = other DNA
aatacatttgatctgttatt

SEQ ID NO: 72432 - DNA, 20 bp, synthetic construct
  misc_feature 1..20: note = Description of Artificial Sequence: Synthetic oligonucleotide
  misc_feature 1..20: note = Target: SCN10A; (+) strand; PAM type: YTN; PAM sequence: TTA
  source 1..20: mol_type = other DNA
atacatttgatctgttattg

SEQ ID NO: 72433 - DNA, 20 bp, synthetic construct
  misc_feature 1..20: note = Description of Artificial Sequence: Synthetic oligonucleotide
  misc_feature 1..20: note = Target: SCN10A; (+) strand; PAM type: YTN; PAM sequence: TTT
  source 1..20: mol_type = other DNA
gatctgttattggctaaaat

SEQ ID NO: 72434 - DNA, 20 bp, synthetic construct
  misc_feature 1..20: note = Description of Artificial Sequence: Synthetic oligonucleotide
  misc_feature 1..20: note = Target: SCN10A; (+) strand; PAM type: YTN; PAM sequence: TTG
  source 1..20: mol_type = other DNA
atctgttattggctaaaatt

SEQ ID NO: 72435 - DNA, 20 bp, synthetic construct
  misc_feature 1..20: note = Description of Artificial Sequence: Synthetic oligonucleotide
  misc_feature 1..20: note = Target: SCN10A; (+) strand; PAM type: YTN; PAM sequence: CTG
  source 1..20: mol_type = other DNA
ttattggctaaaattaattg

SEQ ID NO: 72436 - DNA, 20 bp, synthetic construct
  misc_feature 1..20: note = Description of Artificial Sequence: Synthetic oligonucleotide
  misc_feature 1..20: note = Target: SCN10A; (+) strand; PAM type: YTN; PAM sequence: TTA
  source 1..20: mol_type = other DNA
ttggctaaaattaattgaaa

SEQ ID NO: 72437 - DNA, 20 bp, synthetic construct
  misc_feature 1..20: note = Description of Artificial Sequence: Synthetic oligonucleotide
  misc_feature 1..20: note = Target: SCN10A; (+) strand; PAM type: YTN; PAM sequence: TTG
  source 1..20: mol_type = other DNA
gctaaaattaattgaaaatt

SEQ ID NO: 72438 - DNA, 20 bp, synthetic construct
  misc_feature 1..20: note = Description of Artificial Sequence: Synthetic oligonucleotide
  misc_feature 1..20: note = Target: SCN10A; (+) strand; PAM type: YTN; PAM sequence: CTA
  source 1..20: mol_type = other DNA
aaattaattgaaaatttcta

SEQ ID NO: 72439 - DNA, 20 bp, synthetic construct
  misc_feature 1..20: note = Description of Artificial Sequence: Synthetic oligonucleotide
  misc_feature 1..20: note = Target: SCN10A; (+) strand; PAM type: YTN; PAM sequence: TTA
  source 1..20: mol_type = other DNA
attgaaaatttctattccta

SEQ ID NO: 72440 - DNA, 20 bp, synthetic construct
  misc_feature 1..20: note = Description of Artificial Sequence: Synthetic oligonucleotide
  misc_feature 1..20: note = Target: SCN10A; (+) strand; PAM type: YTN; PAM sequence: TTG
  source 1..20: mol_type = other DNA
aaaatttctattcctacaat

SEQ ID NO: 72441 - DNA, 20 bp, synthetic construct
  misc_feature 1..20: note = Description of Artificial Sequence: Synthetic oligonucleotide
  misc_feature 1..20: note = Target: SCN10A; (+) strand; PAM type: YTN; PAM sequence: TTT
  source 1..20: mol_type = other DNA
ctattcctacaatgttttta

SEQ ID NO: 72442 - DNA, 20 bp, synthetic construct
  misc_feature 1..20: note = Description of Artificial Sequence: Synthetic oligonucleotide
  misc_feature 1..20: note = Target: SCN10A; (+) strand; PAM type: YTN; PAM sequence: TTC
  source 1..20: mol_type = other DNA
tattcctacaatgtttttat

SEQ ID NO: 72443 - DNA, 20 bp, synthetic construct
  misc_feature 1..20: note = Description of Artificial Sequence: Synthetic oligonucleotide
  misc_feature 1..20: note = Target: SCN10A; (+) strand; PAM type: YTN; PAM sequence: CTA
  source 1..20: mol_type = other DNA
ttcctacaatgtttttattt

SEQ ID NO: 72444 - DNA, 20 bp, synthetic construct
  misc_feature 1..20: note = Description of Artificial Sequence: Synthetic oligonucleotide
  misc_feature 1..20: note = Target: SCN10A; (+) strand; PAM type: YTN; PAM sequence: TTC
  source 1..20: mol_type = other DNA
ctacaatgtttttatttatc

SEQ ID NO: 72445 - DNA, 20 bp, synthetic construct
  misc_feature 1..20: note = Description of Artificial Sequence: Synthetic oligonucleotide
  misc_feature 1..20: note = Target: SCN10A; (+) strand; PAM type: YTN; PAM sequence: CTA
  source 1..20: mol_type = other DNA
caatgtttttatttatcctc

SEQ ID NO: 72446 - DNA, 20 bp, synthetic construct
  misc_feature 1..20: note = Description of Artificial Sequence: Synthetic oligonucleotide
  misc_feature 1..20: note = Target: SCN10A; (+) strand; PAM type: YTN; PAM sequence: TTT
  source 1..20: mol_type = other DNA
ttatttatcctcctactcta

SEQ ID NO: 72447 - DNA, 20 bp, synthetic construct
  misc_feature 1..20: note = Description of Artificial Sequence: Synthetic oligonucleotide
  misc_feature 1..20: note = Target: SCN10A; (+) strand; PAM type: YTN; PAM sequence: TTT
  source 1..20: mol_type = other DNA
tatttatcctcctactctaa

SEQ ID NO: 72448 - DNA, 20 bp, synthetic construct
  misc_feature 1..20: note = Description of Artificial Sequence: Synthetic oligonucleotide
  misc_feature 1..20: note = Target: SCN10A; (+) strand; PAM type: YTN; PAM sequence: TTT
  source 1..20: mol_type = other DNA
atttatcctcctactctaat

SEQ ID NO: 72449 - DNA, 20 bp, synthetic construct
  misc_feature 1..20: note = Description of Artificial Sequence: Synthetic oligonucleotide
  misc_feature 1..20: note = Target: SCN10A; (+) strand; PAM type: YTN; PAM sequence: TTA
  source 1..20: mol_type = other DNA
tttatcctcctactctaata

SEQ ID NO: 72450 - DNA, 20 bp, synthetic construct
  misc_feature 1..20: note = Description of Artificial Sequence: Synthetic oligonucleotide
  misc_feature 1..20: note = Target: SCN10A; (+) strand; PAM type: YTN; PAM sequence: TTT
  source 1..20: mol_type = other DNA
atcctcctactctaataatt

SEQ ID NO: 72451 - DNA, 20 bp, synthetic construct
  misc_feature 1..20: note = Description of Artificial Sequence: Synthetic oligonucleotide
  misc_feature 1..20: note = Target: SCN10A; (+) strand; PAM type: YTN; PAM sequence: TTA
  source 1..20: mol_type = other DNA
tcctcctactctaataattt

SEQ ID NO: 72452 - DNA, 20 bp, synthetic construct
  misc_feature 1..20: note = Description of Artificial Sequence: Synthetic oligonucleotide
  misc_feature 1..20: note = Target: SCN10A; (+) strand; PAM type: YTN; PAM sequence: CTC
  source 1..20: mol_type = other DNA
ctactctaataatttctgat

SEQ ID NO: 72453 - DNA, 20 bp, synthetic construct
  misc_feature 1..20: note = Description of Artificial Sequence: Synthetic oligonucleotide
  misc_feature 1..20: note = Target: SCN10A; (+) strand; PAM type: YTN; PAM sequence: CTA
  source 1..20: mol_type = other DNA
ctctaataatttctgattta

SEQ ID NO: 72454 - DNA, 20 bp, synthetic construct
  misc_feature 1..20: note = Description of Artificial Sequence: Synthetic oligonucleotide
  misc_feature 1..20: note = Target: SCN10A; (+) strand; PAM type: YTN; PAM sequence: CTC
  source 1..20: mol_type = other DNA
taataatttctgatttataa

SEQ ID NO: 72455 - DNA, 20 bp, synthetic construct
  misc_feature 1..20: note = Description of Artificial Sequence: Synthetic oligonucleotide
  misc_feature 1..20: note = Target: SCN10A; (+) strand; PAM type: YTN; PAM sequence: CTA
  source 1..20: mol_type = other DNA
ataatttctgatttataaat

SEQ ID NO: 72456 - DNA, 20 bp, synthetic construct
  misc_feature 1..20: note = Description of Artificial Sequence: Synthetic oligonucleotide
  misc_feature 1..20: note = Target: SCN10A; (+) strand; PAM type: YTN; PAM sequence: TTT
  source 1..20: mol_type = other DNA
ctgatttataaatattgttg

SEQ ID NO: 72457 - DNA, 20 bp, synthetic construct
  misc_feature 1..20: note = Description of Artificial Sequence: Synthetic oligonucleotide
  misc_feature 1..20: note = Target: SCN10A; (+) strand; PAM type: YTN; PAM sequence: TTC
  source 1..20: mol_type = other DNA
tgatttataaatattgttgc

SEQ ID NO: 72458 - DNA, 20 bp, synthetic construct
  misc_feature 1..20: note = Description of Artificial Sequence: Synthetic oligonucleotide
  misc_feature 1..20: note = Target: SCN10A; (+) strand; PAM type: YTN; PAM sequence: CTG
  source 1..20: mol_type = other DNA
atttataaatattgttgcca

SEQ ID NO: 72459 - DNA, 20 bp, synthetic construct
  misc_feature 1..20: note = Description of Artificial Sequence: Synthetic oligonucleotide
  misc_feature 1..20: note = Target: SCN10A; (+) strand; PAM type: YTN; PAM sequence: TTT
  source 1..20: mol_type = other DNA
ataaatattgttgccatctt

SEQ ID NO: 72460 - DNA, 20 bp, synthetic construct
  misc_feature 1..20: note = Description of Artificial Sequence: Synthetic oligonucleotide
  misc_feature 1..20: note = Target: SCN10A; (+) strand; PAM type: YTN; PAM sequence: TTA
  source 1..20: mol_type = other DNA
taaatattgttgccatctta

SEQ ID NO: 72461 - DNA, 20 bp, synthetic construct
  misc_feature 1..20: note = Description of Artificial Sequence: Synthetic oligonucleotide
  misc_feature 1..20: note = Target: SCN10A; (+) strand; PAM type: YTN; PAM sequence: TTG
  source 1..20: mol_type = other DNA
ttgccatcttatttgttgca

SEQ ID NO: 72462 - DNA, 20 bp, synthetic construct
  misc_feature 1..20: note = Description of Artificial Sequence: Synthetic oligonucleotide
  misc_feature 1..20: note = Target: SCN10A; (+) strand; PAM type: YTN; PAM sequence: TTG
  source 1..20: mol_type = other DNA
ccatcttatttgttgcaaag

SEQ ID NO: 72463 - DNA, 20 bp, synthetic construct
  misc_feature 1..20: note = Description of Artificial Sequence: Synthetic oligonucleotide
  misc_feature 1..20: note = Target: SCN10A; (+) strand; PAM type: YTN; PAM sequence: CTT
  source 1..20: mol_type = other DNA
atttgttgcaaagatataga

SEQ ID NO: 72464 - DNA, 20 bp, synthetic construct
  misc_feature 1..20: note = Description of Artificial Sequence: Synthetic oligonucleotide
  misc_feature 1..20: note = Target: SCN10A; (+) strand; PAM type: YTN; PAM sequence: TTA
  source 1..20: mol_type = other DNA
tttgttgcaaagatatagat

SEQ ID NO: 72465 - DNA, 20 bp, synthetic construct
  misc_feature 1..20: note = Description of Artificial Sequence: Synthetic oligonucleotide
  misc_feature 1..20: note = Target: SCN10A; (+) strand; PAM type: YTN; PAM sequence: TTT
  source 1..20: mol_type = other DNA
gttgcaaagatatagattac

SEQ ID NO: 72466 - DNA, 20 bp, synthetic construct
  misc_feature 1..20: note = Description of Artificial Sequence: Synthetic oligonucleotide
  misc_feature 1..20: note = Target: SCN10A; (+) strand; PAM type: YTN; PAM sequence: TTG
  source 1..20: mol_type = other DNA
ttgcaaagatatagattact

SEQ ID NO: 72467 - DNA, 20 bp, synthetic construct
  misc_feature 1..20: note = Description of Artificial Sequence: Synthetic oligonucleotide
  misc_feature 1..20: note = Target: SCN10A; (+) strand; PAM type: YTN; PAM sequence: TTG
  source 1..20: mol_type = other DNA
caaagatatagattactatc

SEQ ID NO: 72468 - DNA, 20 bp, synthetic construct
  misc_feature 1..20: note = Description of Artificial Sequence: Synthetic oligonucleotide
  misc_feature 1..20: note = Target: SCN10A; (+) strand; PAM type: YTN; PAM sequence: TTA
  source 1..20: mol_type = other DNA
ctatcgtctttaatattaat

SEQ ID NO: 72469 - DNA, 20 bp, synthetic construct
  misc_feature 1..20: note = Description of Artificial Sequence: Synthetic oligonucleotide
  misc_feature 1..20: note = Target: SCN10A; (+) strand; PAM type: YTN; PAM sequence: CTA
  source 1..20: mol_type = other DNA
tcgtctttaatattaatatg

SEQ ID NO: 72470 - DNA, 20 bp, synthetic construct
  misc_feature 1..20: note = Description of Artificial Sequence: Synthetic oligonucleotide
  misc_feature 1..20: note = Target: SCN10A; (+) strand; PAM type: YTN; PAM sequence: CTT
  source 1..20: mol_type = other DNA
taatattaatatgtctgtgc

SEQ ID NO: 72471 - DNA, 20 bp, synthetic construct
  misc_feature 1..20: note = Description of Artificial Sequence: Synthetic oligonucleotide
  misc_feature 1..20: note = Target: SCN10A; (+) strand; PAM type: YTN; PAM sequence: TTT
  source 1..20: mol_type = other DNA
aatattaatatgtctgtgca

SEQ ID NO: 72472 - DNA, 20 bp, synthetic construct
  misc_feature 1..20: note = Description of Artificial Sequence: Synthetic oligonucleotide
  misc_feature 1..20: note = Target: SCN10A; (+) strand; PAM type: YTN; PAM sequence: TTA
  source 1..20: mol_type = other DNA
atattaatatgtctgtgcaa

SEQ ID NO: 72473 - DNA, 20 bp, synthetic construct
  misc_feature 1..20: note = Description of Artificial Sequence: Synthetic oligonucleotide
  misc_feature 1..20: note = Target: SCN10A; (+) strand; PAM type: YTN; PAM sequence: TTA
  source 1..20: mol_type = other DNA
atatgtctgtgcaatttttg

SEQ ID NO: 72474 - DNA, 20 bp, synthetic construct
  misc_feature 1..20: note = Description of Artificial Sequence: Synthetic oligonucleotide
  misc_feature 1..20: note = Target: SCN10A; (+) strand; PAM type: YTN; PAM sequence: CTG
  source 1..20: mol_type = other DNA
tgcaatttttgtcctatttc

SEQ ID NO: 72475 - DNA, 20 bp, synthetic construct
  misc_feature 1..20: note = Description of Artificial Sequence: Synthetic oligonucleotide
  misc_feature 1..20: note = Target: SCN10A; (+) strand; PAM type: YTN; PAM sequence: TTT
  source 1..20: mol_type = other DNA
ttgtcctatttcatgctttt

SEQ ID NO: 72476 - DNA, 20 bp, synthetic construct
  misc_feature 1..20: note = Description of Artificial Sequence: Synthetic oligonucleotide
  misc_feature 1..20: note = Target: SCN10A; (+) strand; PAM type: YTN; PAM sequence: TTT
  source 1..20: mol_type = other DNA
tgtcctatttcatgcttttt

SEQ ID NO: 72477 - DNA, 20 bp, synthetic construct
  misc_feature 1..20: note = Description of Artificial Sequence: Synthetic oligonucleotide
  misc_feature 1..20: note = Target: SCN10A; (+) strand; PAM type: YTN; PAM sequence: TTT
  source 1..20: mol_type = other DNA
gtcctatttcatgctttttg

SEQ ID NO: 72478 - DNA, 20 bp, synthetic construct
  misc_feature 1..20: note = Description of Artificial Sequence: Synthetic oligonucleotide
  misc_feature 1..20: note = Target: SCN10A; (+) strand; PAM type: YTN; PAM sequence: TTG
  source 1..20: mol_type = other DNA
tcctatttcatgctttttga

SEQ ID NO: 72479 - DNA, 20 bp, synthetic construct
  misc_feature 1..20: note = Description of Artificial Sequence: Synthetic oligonucleotide
  misc_feature 1..20: note = Target: SCN10A; (+) strand; PAM type: YTN; PAM sequence: CTA
  source 1..20: mol_type = other DNA
tttcatgctttttgaccgag

SEQ ID NO: 72480 - DNA, 20 bp, synthetic construct
  misc_feature 1..20: note = Description of Artificial Sequence: Synthetic oligonucleotide
  misc_feature 1..20: note = Target: SCN10A; (+) strand; PAM type: YTN; PAM sequence: TTT
  source 1..20: mol_type = other DNA
catgctttttgaccgagatt

SEQ ID NO: 72481 - DNA, 20 bp, synthetic construct
  misc_feature 1..20: note = Description of Artificial Sequence: Synthetic oligonucleotide
  misc_feature 1..20: note = Target: SCN10A; (+) strand; PAM type: YTN; PAM sequence: TTC
  source 1..20: mol_type = other DNA
atgctttttgaccgagattc

SEQ ID NO: 72482 - DNA, 20 bp, synthetic construct
  misc_feature 1..20: note = Description of Artificial Sequence: Synthetic oligonucleotide
  misc_feature 1..20: note = Target: SCN10A; (+) strand; PAM type: YTN; PAM sequence: CTT
  source 1..20: mol_type = other DNA
tttgaccgagattccacttt

SEQ ID NO: 72483 - DNA, 20 bp, synthetic construct
  misc_feature 1..20: note = Description of Artificial Sequence: Synthetic oligonucleotide
  misc_feature 1..20: note = Target: SCN10A; (+) strand; PAM type: YTN; PAM sequence: TTT
  source 1..20: mol_type = other DNA
ttgaccgagattccactttc

SEQ ID NO: 72484 - DNA, 20 bp, synthetic construct
  misc_feature 1..20: note = Description of Artificial Sequence: Synthetic oligonucleotide
  misc_feature 1..20: note = Target: SCN10A; (+) strand; PAM type: YTN; PAM sequence: TTT
  source 1..20: mol_type = other DNA
tgaccgagattccactttct

SEQ ID NO: 72485 - DNA, 20 bp, synthetic construct
  misc_feature 1..20: note = Description of Artificial Sequence: Synthetic oligonucleotide
  misc_feature 1..20: note = Target: SCN10A; (+) strand; PAM type: YTN; PAM sequence: TTT
  source 1..20: mol_type = other DNA
gaccgagattccactttctc

SEQ ID NO: 72486 - DNA, 20 bp, synthetic construct
  misc_feature 1..20: note = Description of Artificial Sequence: Synthetic oligonucleotide
  misc_feature 1..20: note = Target: SCN10A; (+) strand; PAM type: YTN; PAM sequence: TTG
  source 1..20: mol_type = other DNA
accgagattccactttctct

SEQ ID NO: 72487 - DNA, 20 bp, synthetic construct
  misc_feature 1..20: note = Description of Artificial Sequence: Synthetic oligonucleotide
  misc_feature 1..20: note = Target: SCN10A; (+) strand; PAM type: YTN; PAM sequence: TTC
  source 1..20: mol_type = other DNA
cactttctctgatattaaaa

SEQ ID NO: 72488 - DNA, 20 bp, synthetic construct
  misc_feature 1..20: note = Description of Artificial Sequence: Synthetic oligonucleotide
  misc_feature 1..20: note = Target: SCN10A; (+) strand; PAM type: YTN; PAM sequence: CTT
  source 1..20: mol_type = other DNA
tctctgatattaaaatcatg

SEQ ID NO: 72489 - DNA, 20 bp, synthetic construct
  misc_feature 1..20: note = Description of Artificial Sequence: Synthetic oligonucleotide
  misc_feature 1..20: note = Target: SCN10A; (+) strand; PAM type: YTN; PAM sequence: TTT
  source 1..20: mol_type = other DNA
ctctgatattaaaatcatgg

SEQ ID NO: 72490 - DNA, 20 bp, synthetic construct
  misc_feature 1..20: note = Description of Artificial Sequence: Synthetic oligonucleotide
  misc_feature 1..20: note = Target: SCN10A; (+) strand; PAM type: YTN; PAM sequence: TTC
  source 1..20: mol_type = other DNA
tctgatattaaaatcatgga

SEQ ID NO: 72491 - DNA, 20 bp, synthetic construct
  misc_feature 1..20: note = Description of Artificial Sequence: Synthetic oligonucleotide
  misc_feature 1..20: note = Target: SCN10A; (+) strand; PAM type: YTN; PAM sequence: CTC
  source 1..20: mol_type = other DNA
tgatattaaaatcatggatc

SEQ ID NO: 72492 - DNA, 20 bp, synthetic construct
  misc_feature 1..20: note = Description of Artificial Sequence: Synthetic oligonucleotide
  misc_feature 1..20: note = Target: SCN10A; (+) strand; PAM type: YTN; PAM sequence: CTG
  source 1..20: mol_type = other DNA
atattaaaatcatggatcct

SEQ ID NO: 72493 - DNA, 20 bp, synthetic construct
  misc_feature 1..20: note = Description of Artificial Sequence: Synthetic oligonucleotide
  misc_feature 1..20: note = Target: SCN10A; (+) strand; PAM type: YTN; PAM sequence: TTA
  source 1..20: mol_type = other DNA
aaatcatggatcctgctttc

SEQ ID NO: 72494 - DNA, 20 bp, synthetic construct
  misc_feature 1..20: note = Description of Artificial Sequence: Synthetic oligonucleotide
  misc_feature 1..20: note = Target: SCN10A; (+) strand; PAM type: YTN; PAM sequence: CTG
  source 1..20: mol_type = other DNA
ctttctttgtttgcctttgc

SEQ ID NO: 72495 - DNA, 20 bp, synthetic construct
  misc_feature 1..20: note = Description of Artificial Sequence: Synthetic oligonucleotide
  misc_feature 1..20: note = Target: SCN10A; (+) strand; PAM type: YTN; PAM sequence: CTT
  source 1..20: mol_type = other DNA
tctttgtttgcctttgctta

SEQ ID NO: 72496 - DNA, 20 bp, synthetic construct
  misc_feature 1..20: note = Description of Artificial Sequence: Synthetic oligonucleotide
  misc_feature 1..20: note = Target: SCN10A; (+) strand; PAM type: YTN; PAM sequence: TTT
  source 1..20: mol_type = other DNA
ctttgtttgcctttgcttat

SEQ ID NO: 72497 - DNA, 20 bp, synthetic construct
  misc_feature 1..20: note = Description of Artificial Sequence: Synthetic oligonucleotide
  misc_feature 1..20: note = Target: SCN10A; (+) strand; PAM type: YTN; PAM sequence: TTC
  source 1..20: mol_type = other DNA
tttgtttgcctttgcttatg

SEQ ID NO: 72498 - DNA, 20 bp, synthetic construct
  misc_feature 1..20: note = Description of Artificial Sequence: Synthetic oligonucleotide
  misc_feature 1..20: note = Target: SCN10A; (+) strand; PAM type: YTN; PAM sequence: CTT
  source 1..20: mol_type = other DNA
tgtttgcctttgcttatgtc

SEQ ID NO: 72499 - DNA, 20 bp, synthetic construct
  misc_feature 1..20: note = Description of Artificial Sequence: Synthetic oligonucleotide
  misc_feature 1..20: note = Target: SCN10A; (+) strand; PAM type: YTN; PAM sequence: TTT
  source 1..20: mol_type = other DNA
gtttgcctttgcttatgtct

SEQ ID NO: 72500 - DNA, 20 bp, synthetic construct
  misc_feature 1..20: note = Description of Artificial Sequence: Synthetic oligonucleotide
  misc_feature 1..20: note = Target: SCN10A; (+) strand; PAM type: YTN; PAM sequence: TTG
  source 1..20: mol_type = other DNA
tttgcctttgcttatgtctt

SEQ ID NO: 72501 - DNA, 20 bp, synthetic construct
  misc_feature 1..20: note = Description of Artificial Sequence: Synthetic oligonucleotide
  misc_feature 1..20: note = Target: SCN10A; (+) strand; PAM type: YTN; PAM sequence: TTT
  source 1..20: mol_type = other DNA
gcctttgcttatgtcttttg

SEQ ID NO: 72502 - DNA, 20 bp, synthetic construct
  misc_feature 1..20: note = Description of Artificial Sequence: Synthetic oligonucleotide
  misc_feature 1..20: note = Target: SCN10A; (+) strand; PAM type: YTN; PAM sequence: TTG
  source 1..20: mol_type = other DNA
cctttgcttatgtcttttga

SEQ ID NO: 72503 - DNA, 20 bp, synthetic construct
  misc_feature 1..20: note = Description of Artificial Sequence: Synthetic oligonucleotide
  misc_feature 1..20: note = Target: SCN10A; (+) strand; PAM type: YTN; PAM sequence: CTT
  source 1..20: mol_type = other DNA
tgcttatgtcttttgaattc

SEQ ID NO: 72504 - DNA, 20 bp, synthetic construct
  misc_feature 1..20: note = Description of Artificial Sequence: Synthetic oligonucleotide
  misc_feature 1..20: note = Target: SCN10A; (+) strand; PAM type: YTN; PAM sequence: TTT
  source 1..20: mol_type = other DNA
gcttatgtcttttgaattct

SEQ ID NO: 72505 - DNA, 20 bp, synthetic construct
  misc_feature 1..20: note = Description of Artificial Sequence: Synthetic oligonucleotide
  misc_feature 1..20: note = Target: SCN10A; (+) strand; PAM type: YTN; PAM sequence: TTG
  source 1..20: mol_type = other DNA
cttatgtcttttgaattcta

SEQ ID NO: 72506 - DNA, 20 bp, synthetic construct
  misc_feature 1..20: note = Description of Artificial Sequence: Synthetic oligonucleotide
  misc_feature 1..20: note = Target: SCN10A; (+) strand; PAM type: YTN; PAM sequence: CTT
  source 1..20: mol_type = other DNA
atgtcttttgaattctataa

SEQ ID NO: 72507 - DNA, 20 bp, synthetic construct
  misc_feature 1..20: note = Description of Artificial Sequence: Synthetic oligonucleotide
  misc_feature 1..20: note = Target: SCN10A; (+) strand; PAM type: YTN; PAM sequence: TTA
  source 1..20: mol_type = other DNA
tgtcttttgaattctataat

SEQ ID NO: 72508 - DNA, 20 bp, synthetic construct
  misc_feature 1..20: note = Description of Artificial Sequence: Synthetic oligonucleotide
  misc_feature 1..20: note = Target: SCN10A; (+) strand; PAM type: YTN; PAM sequence: CTT
  source 1..20: mol_type = other DNA
ttgaattctataattttagc

SEQ ID NO: 72509 - DNA, 20 bp, synthetic construct
  misc_feature 1..20: note = Description of Artificial Sequence: Synthetic oligonucleotide
  misc_feature 1..20: note = Target: SCN10A; (+) strand; PAM type: YTN; PAM sequence: TTT
  source 1..20: mol_type = other DNA
tgaattctataattttagcc

SEQ ID NO: 72510 - DNA, 20 bp, synthetic construct
  misc_feature 1..20: note = Description of Artificial Sequence: Synthetic oligonucleotide
  misc_feature 1..20: note = Target: SCN10A; (+) strand; PAM type: YTN; PAM sequence: TTT
  source 1..20: mol_type = other DNA
gaattctataattttagcct

SEQ ID NO: 72511 - DNA, 20 bp, synthetic construct
  misc_feature 1..20: note = Description of Artificial Sequence: Synthetic oligonucleotide
  misc_feature 1..20: note = Target: SCN10A; (+) strand; PAM type: YTN; PAM sequence: TTG
  source 1..20: mol_type = other DNA
aattctataattttagcctt

SEQ ID NO: 72512 - DNA, 20 bp, synthetic construct
  misc_feature 1..20: note = Description of Artificial Sequence: Synthetic oligonucleotide
  misc_feature 1..20: note = Target: SCN10A; (+) strand; PAM type: YTN; PAM sequence: TTC
  source 1..20: mol_type = other DNA
tataattttagcctttctgt

SEQ ID NO: 72513 - DNA, 20 bp, synthetic construct
  misc_feature 1..20: note = Description of Artificial Sequence: Synthetic oligonucleotide
  misc_feature 1..20: note = Target: SCN10A; (+) strand; PAM type: YTN; PAM sequence: CTA
  source 1..20: mol_type = other DNA
taattttagcctttctgtat

SEQ ID NO: 72514 - DNA, 20 bp, synthetic construct
  misc_feature 1..20: note = Description of Artificial Sequence: Synthetic oligonucleotide
  misc_feature 1..20: note = Target: SCN10A; (+) strand; PAM type: YTN; PAM sequence: TTT
  source 1..20: mol_type = other DNA
tagcctttctgtatcaccgt

SEQ ID NO: 72515 - DNA, 20 bp, synthetic construct
  misc_feature 1..20: note = Description of Artificial Sequence: Synthetic oligonucleotide
  misc_feature 1..20: note = Target: SCN10A; (+) strand; PAM type: YTN; PAM sequence: TTT
  source 1..20: mol_type = other DNA
agcctttctgtatcaccgtg

SEQ ID NO: 72516 - DNA, 20 bp, synthetic construct
  misc_feature 1..20: note = Description of Artificial Sequence: Synthetic oligonucleotide
  misc_feature 1..20: note = Target: SCN10A; (+) strand; PAM type: YTN; PAM sequence: TTA
  source 1..20: mol_type = other DNA
gcctttctgtatcaccgtga

SEQ ID NO: 72517 - DNA, 20 bp, synthetic construct
  misc_feature 1..20: note = Description of Artificial Sequence: Synthetic oligonucleotide
  misc_feature 1..20: note = Target: SCN10A; (+) strand; PAM type: YTN; PAM sequence: CTT
  source 1..20: mol_type = other DNA
tctgtatcaccgtgaggagt

SEQ ID NO: 72518 - DNA, 20 bp, synthetic construct
  misc_feature 1..20: note = Description of Artificial Sequence: Synthetic oligonucleotide
  misc_feature 1..20: note = Target: SCN10A; (+) strand; PAM type: YTN; PAM sequence: TTT
  source 1..20: mol_type = other DNA
ctgtatcaccgtgaggagta

SEQ ID NO: 72519 - DNA, 20 bp, synthetic construct
  misc_feature 1..20: note = Description of Artificial Sequence: Synthetic oligonucleotide
  misc_feature 1..20: note = Target: SCN10A; (+) strand; PAM type: YTN; PAM sequence: TTC
  source 1..20: mol_type = other DNA
tgtatcaccgtgaggagtat

SEQ ID NO: 72520 - DNA, 20 bp, synthetic construct
  misc_feature 1..20: note = Description of Artificial Sequence: Synthetic oligonucleotide
  misc_feature 1..20: note = Target: SCN10A; (+) strand; PAM type: YTN; PAM sequence: CTG
  source 1..20: mol_type = other DNA
tatcaccgtgaggagtattt

SEQ ID NO: 72521 - DNA, 20 bp, synthetic construct
  misc_feature 1..20: note = Description of Artificial Sequence: Synthetic oligonucleotide
  misc_feature 1..20: note = Target: SCN10A; (+) strand; PAM type: YTN; PAM sequence: TTT
  source 1..20: mol_type = other DNA
tttttattcaacatagagtt

SEQ ID NO: 72522 - DNA, 20 bp, synthetic construct
  misc_feature 1..20: note = Description of Artificial Sequence: Synthetic oligonucleotide
  misc_feature 1..20: note = Target: SCN10A; (+) strand; PAM type: YTN; PAM sequence: TTT
  source 1..20: mol_type = other DNA
ttttattcaacatagagttg

SEQ ID NO: 72523 - DNA, 20 bp, synthetic construct
  misc_feature 1..20: note = Description of Artificial Sequence: Synthetic oligonucleotide
  misc_feature 1..20: note = Target: SCN10A; (+) strand; PAM type: YTN; PAM sequence: TTT
  source 1..20: mol_type = other DNA
tttattcaacatagagttgg

SEQ ID NO: 72524 - DNA, 20 bp, synthetic construct
  misc_feature 1..20: note = Description of Artificial Sequence: Synthetic oligonucleotide
  misc_feature 1..20: note = Target: SCN10A; (+) strand; PAM type: YTN; PAM sequence: TTT
  source 1..20: mol_type = other DNA
ttattcaacatagagttggg

SEQ ID NO: 72525 - DNA, 20 bp, synthetic construct
  misc_feature 1..20: note = Description of Artificial Sequence: Synthetic oligonucleotide
  misc_feature 1..20: note = Target: SCN10A; (+) strand; PAM type: YTN; PAM sequence: TTT
  source 1..20: mol_type = other DNA
tattcaacatagagttgggt

SEQ ID NO: 72526 - DNA, 20 bp, synthetic construct
  misc_feature 1..20: note = Description of Artificial Sequence: Synthetic oligonucleotide
  misc_feature 1..20: note = Target: SCN10A; (+) strand; PAM type: YTN; PAM sequence: TTT
  source 1..20: mol_type = other DNA
attcaacatagagttgggta

SEQ ID NO: 72527 - DNA, 20 bp, synthetic construct
  misc_feature 1..20: note = Description of Artificial Sequence: Synthetic oligonucleotide
  misc_feature 1..20: note = Target: SCN10A; (+) strand; PAM type: YTN; PAM sequence: TTA
  source 1..20: mol_type = other DNA
ttcaacatagagttgggtat

SEQ ID NO: 72528 - DNA, 20 bp, synthetic construct
  misc_feature 1..20: note = Description of Artificial Sequence: Synthetic oligonucleotide
  misc_feature 1..20: note = Target: SCN10A; (+) strand; PAM type: YTN; PAM sequence: TTC
  source 1..20: mol_type = other DNA
aacatagagttgggtattgc

SEQ ID NO: 72529 - DNA, 20 bp, synthetic construct
  misc_feature 1..20: note = Description of Artificial Sequence: Synthetic oligonucleotide
  misc_feature 1..20: note = Target: SCN10A; (+) strand; PAM type: YTN; PAM sequence: TTG
  source 1..20: mol_type = other DNA
ggtattgctttgtaatgtaa

SEQ ID NO: 72530 - DNA, 20 bp, synthetic construct
  misc_feature 1..20: note = Description of Artificial Sequence: Synthetic oligonucleotide
  misc_feature 1..20: note = Target: SCN10A; (+) strand; PAM type: YTN; PAM sequence: TTG
  source 1..20: mol_type = other DNA
ctttgtaatgtaataggcat

SEQ ID NO: 72531 - DNA, 20 bp, synthetic construct
  misc_feature 1..20: note = Description of Artificial Sequence: Synthetic oligonucleotide
  misc_feature 1..20: note = Target: SCN10A; (+) strand; PAM type: YTN; PAM sequence: CTT
  source 1..20: mol_type = other DNA
tgtaatgtaataggcatttt

SEQ ID NO: 72532 - DNA, 20 bp, synthetic construct
  misc_feature 1..20: note = Description of Artificial Sequence: Synthetic oligonucleotide
  misc_feature 1..20: note = Target: SCN10A; (+) strand; PAM type: YTN; PAM sequence: TTT
  source 1..20: mol_type = other DNA
gtaatgtaataggcattttt

SEQ ID NO: 72533 - DNA, 20 bp, synthetic construct
  misc_feature 1..20: note = Description of Artificial Sequence: Synthetic oligonucleotide
  misc_feature 1..20: note = Target: SCN10A; (+) strand; PAM type: YTN; PAM sequence: TTG
  source 1..20: mol_type = other DNA
taatgtaataggcattttta

SEQ ID NO: 72534 - DNA, 20 bp, synthetic construct
  misc_feature 1..20: note = Description of Artificial Sequence: Synthetic oligonucleotide
  misc_feature 1..20: note = Target: SCN10A; (+) strand; PAM type: YTN; PAM sequence: TTT
  source 1..20: mol_type = other DNA
ttaaaaataggtgagtaaaa

SEQ ID NO: 72535 - DNA, 20 bp, synthetic construct
  misc_feature 1..20: note = Description of Artificial Sequence: Synthetic oligonucleotide
  misc_feature 1..20: note = Target: SCN10A; (+) strand; PAM type: YTN; PAM sequence: TTT
  source 1..20: mol_type = other DNA
taaaaataggtgagtaaaat

SEQ ID NO: 72536 - DNA, 20 bp, synthetic construct
  misc_feature 1..20: note = Description of Artificial Sequence: Synthetic oligonucleotide
  misc_feature 1..20: note = Target: SCN10A; (+) strand; PAM type: YTN; PAM sequence: TTT
  source 1..20: mol_type = other DNA
aaaaataggtgagtaaaatc

SEQ ID NO: 72537 - DNA, 20 bp, synthetic construct
  misc_feature 1..20: note = Description of Artificial Sequence: Synthetic oligonucleotide
  misc_feature 1..20: note = Target: SCN10A; (+) strand; PAM type: YTN; PAM sequence: TTA
  source 1..20: mol_type = other DNA
aaaataggtgagtaaaatcc

SEQ ID NO: 72538 - DNA, 20 bp, synthetic construct
  misc_feature 1..20: note = Description of Artificial Sequence: Synthetic oligonucleotide
  misc_feature 1..20: note = Target: SCN10A; (+) strand; PAM type: YTN; PAM sequence: TTT
  source 1..20: mol_type = other DNA
atatttagtgacatgacaga

SEQ ID NO: 72539 - DNA, 20 bp, synthetic construct
  misc_feature 1..20: note = Description of Artificial Sequence: Synthetic oligonucleotide
  misc_feature 1..20: note = Target: SCN10A; (+) strand; PAM type: YTN; PAM sequence: TTA
  source 1..20: mol_type = other DNA
tatttagtgacatgacagat

SEQ ID NO: 72540 - DNA, 20 bp, synthetic construct
  misc_feature 1..20: note = Description of Artificial Sequence: Synthetic oligonucleotide
  misc_feature 1..20: note = Target: SCN10A; (+) strand; PAM type: YTN; PAM sequence: TTT
  source 1..20: mol_type = other DNA
agtgacatgacagatttgct

SEQ ID NO: 72541 - DNA, 20 bp, synthetic construct
  misc_feature 1..20: note = Description of Artificial Sequence: Synthetic oligonucleotide
  misc_feature 1..20: note = Target: SCN10A; (+) strand; PAM type: YTN; PAM sequence: TTA
  source 1..20: mol_type = other DNA
gtgacatgacagatttgctt

SEQ ID NO: 72542 - DNA, 20 bp, synthetic construct
  misc_feature 1..20: note = Description of Artificial Sequence: Synthetic oligonucleotide
  misc_feature 1..20: note = Target: SCN10A; (+) strand; PAM type: YTN; PAM sequence: TTT
  source 1..20: mol_type = other DNA
gcttagtcttagcttgttta

SEQ ID NO: 72543 - DNA, 20 bp, synthetic construct
  misc_feature 1..20: note = Description of Artificial Sequence: Synthetic oligonucleotide
  misc_feature 1..20: note = Target: SCN10A; (+) strand; PAM type: YTN; PAM sequence: TTG
  source 1..20: mol_type = other DNA
cttagtcttagcttgtttat

SEQ ID NO: 72544 - DNA, 20 bp, synthetic construct
  misc_feature 1..20: note = Description of Artificial Sequence: Synthetic oligonucleotide
  misc_feature 1..20: note = Target: SCN10A; (+) strand; PAM type: YTN; PAM sequence: CTT
  source 1..20: mol_type = other DNA
agtcttagcttgtttatatt

SEQ ID NO: 72545 - DNA, 20 bp, synthetic construct
  misc_feature 1..20: note = Description of Artificial Sequence: Synthetic oligonucleotide
  misc_feature 1..20: note = Target: SCN10A; (+) strand; PAM type: YTN; PAM sequence: TTA
  source 1..20: mol_type = other DNA
gtcttagcttgtttatatta

SEQ ID NO: 72546 - DNA, 20 bp, synthetic construct
  misc_feature 1..20: note = Description of Artificial Sequence: Synthetic oligonucleotide
  misc_feature 1..20: note = Target: SCN10A; (+) strand; PAM type: YTN; PAM sequence: CTT
  source 1..20: mol_type = other DNA
agcttgtttatattatttca

SEQ ID NO: 72547 - DNA, 20 bp, synthetic construct
  misc_feature 1..20: note = Description of Artificial Sequence: Synthetic oligonucleotide
  misc_feature 1..20: note = Target: SCN10A; (+) strand; PAM type: YTN; PAM sequence: TTA
  source 1..20: mol_type = other DNA
gcttgtttatattatttcat

SEQ ID NO: 72548 - DNA, 20 bp, synthetic construct
  misc_feature 1..20: note = Description of Artificial Sequence: Synthetic oligonucleotide
  misc_feature 1..20: note = Target: SCN10A; (+) strand; PAM type: YTN; PAM sequence: CTT
  source 1..20: mol_type = other DNA
gtttatattatttcatatga

SEQ ID NO: 72549 - DNA, 20 bp, synthetic construct
  misc_feature 1..20: note = Description of Artificial Sequence: Synthetic oligonucleotide
  misc_feature 1..20: note = Target: SCN10A; (+) strand; PAM type: YTN; PAM sequence: TTG
  source 1..20: mol_type = other DNA
tttatattatttcatatgac

SEQ ID NO: 72550 - DNA, 20 bp, synthetic construct
  misc_feature 1..20: note = Description of Artificial Sequence: Synthetic oligonucleotide
  misc_feature 1..20: note = Target: SCN10A; (+) strand; PAM type: YTN; PAM sequence: TTT
  source 1..20: mol_type = other DNA
atattatttcatatgacgta

SEQ ID NO: 72551 - DNA, 20 bp, synthetic construct
  misc_feature 1..20: note = Description of Artificial Sequence: Synthetic oligonucleotide
  misc_feature 1..20: note = Target: SCN10A; (+) strand; PAM type: YTN; PAM sequence: TTA
  source 1..20: mol_type = other DNA
tattatttcatatgacgtat

SEQ ID NO: 72552 - DNA, 20 bp, synthetic construct
  misc_feature 1..20: note = Description of Artificial Sequence: Synthetic oligonucleotide
  misc_feature 1..20: note = Target: SCN10A; (+) strand; PAM type: YTN; PAM sequence: TTA
  source 1..20: mol_type = other DNA
tttcatatgacgtatttagt

SEQ ID NO: 72553 - DNA, 20 bp, synthetic construct
  misc_feature 1..20: note = Description of Artificial Sequence: Synthetic oligonucleotide
  misc_feature 1..20: note = Target: SCN10A; (+) strand; PAM type: YTN; PAM sequence: TTT
  source 1..20: mol_type = other DNA
catatgacgtatttagtttt

SEQ ID NO: 72554 - DNA, 20 bp, synthetic construct
  misc_feature 1..20: note = Description of Artificial Sequence: Synthetic oligonucleotide
  misc_feature 1..20: note = Target: SCN10A; (+) strand; PAM type: YTN; PAM sequence: TTC
  source 1..20: mol_type = other DNA
atatgacgtatttagttttt

SEQ ID NO: 72555 - DNA, 20 bp, synthetic construct
  misc_feature 1..20: note = Description of Artificial Sequence: Synthetic oligonucleotide
  misc_feature 1..20: note = Target: SCN10A; (+) strand; PAM type: YTN; PAM sequence: TTT
  source 1..20: mol_type = other DNA
agtttttaaaatattaggtt

SEQ ID NO: 72556 - DNA, 20 bp, synthetic construct
  misc_feature 1..20: note = Description of Artificial Sequence: Synthetic oligonucleotide
  misc_feature 1..20: note = Target: SCN10A; (+) strand; PAM type: YTN; PAM sequence: TTA
  source 1..20: mol_type = other DNA
gtttttaaaatattaggttg

SEQ ID NO: 72557 - DNA, 20 bp, synthetic construct
  misc_feature 1..20: note = Description of Artificial Sequence: Synthetic oligonucleotide
  misc_feature 1..20: note = Target: SCN10A; (+) strand; PAM type: YTN; PAM sequence: TTT
  source 1..20: mol_type = other DNA
ttaaaatattaggttggtac

SEQ ID NO: 72558 - DNA, 20 bp, synthetic construct
  misc_feature 1..20: note = Description of Artificial Sequence: Synthetic oligonucleotide
  misc_feature 1..20: note = Target: SCN10A; (+) strand; PAM type: YTN; PAM sequence: TTT
  source 1..20: mol_type = other DNA
taaaatattaggttggtaca

SEQ ID NO: 72559 - DNA, 20 bp, synthetic construct
  misc_feature 1..20: note = Description of Artificial Sequence: Synthetic oligonucleotide
  misc_feature 1..20: note = Target: SCN10A; (+) strand; PAM type: YTN; PAM sequence: TTT
  source 1..20: mol_type = other DNA
aaaatattaggttggtacaa

SEQ ID NO: 72560 - DNA, 20 bp, synthetic construct
  misc_feature 1..20: note = Description of Artificial Sequence: Synthetic oligonucleotide
  misc_feature 1..20: note = Target: SCN10A; (+) strand; PAM type: YTN; PAM sequence: TTA
  source 1..20: mol_type = other DNA
aaatattaggttggtacaaa

SEQ ID NO: 72561 - DNA, 20 bp, synthetic construct
  misc_feature 1..20: note = Description of Artificial Sequence: Synthetic oligonucleotide
  misc_feature 1..20: note = Target: SCN10A; (+) strand; PAM type: YTN; PAM sequence: TTA
  source 1..20: mol_type = other DNA
ggttggtacaaaagtaattg

SEQ ID NO: 72562 - DNA, 20 bp, synthetic construct
  misc_feature 1..20: note = Description of Artificial Sequence: Synthetic oligonucleotide
  misc_feature 1..20: note = Target: SCN10A; (+) strand; PAM type: YTN; PAM sequence: TTG
  source 1..20: mol_type = other DNA
gtacaaaagtaattgtggtt

SEQ ID NO: 72563 - DNA, 20 bp, synthetic construct
  misc_feature 1..20: note = Description of Artificial Sequence: Synthetic oligonucleotide
  misc_feature 1..20: note = Target: SCN10A; (+) strand; PAM type: YTN; PAM sequence: TTG
  source 1..20: mol_type = other DNA
tggtttttgcattgttgaaa

SEQ ID NO: 72564 - DNA, 20 bp, synthetic construct
  misc_feature 1..20: note = Description of Artificial Sequence: Synthetic oligonucleotide
  misc_feature 1..20: note = Target: SCN10A; (+) strand; PAM type: YTN; PAM sequence: TTT
  source 1..20: mol_type = other DNA
ttgcattgttgaaatttgcc

SEQ ID NO: 72565 - DNA, 20 bp, synthetic construct
  misc_feature 1..20: note = Description of Artificial Sequence: Synthetic oligonucleotide
  misc_feature 1..20: note = Target: SCN10A; (+) strand; PAM type: YTN; PAM sequence: TTT
  source 1..20: mol_type = other DNA
tgcattgttgaaatttgccg

SEQ ID NO: 72566 - DNA, 20 bp, synthetic construct
  misc_feature 1..20: note = Description of Artificial Sequence: Synthetic oligonucleotide
  misc_feature 1..20: note = Target: SCN10A; (+) strand; PAM type: YTN; PAM sequence: TTT
  source 1..20: mol_type = other DNA
gcattgttgaaatttgccgt

SEQ ID NO: 72567 - DNA, 20 bp, synthetic construct
  misc_feature 1..20: note = Description of Artificial Sequence: Synthetic oligonucleotide
  misc_feature 1..20: note = Target: SCN10A; (+) strand; PAM type: YTN; PAM sequence: TTG
  source 1..20: mol_type = other DNA
cattgttgaaatttgccgtt

SEQ ID NO: 72568 - DNA, 20 bp, synthetic construct
  misc_feature 1..20: note = Description of Artificial Sequence: Synthetic oligonucleotide
  misc_feature 1..20: note = Target: SCN10A; (+) strand; PAM type: YTN; PAM sequence: TTG
  source 1..20: mol_type = other DNA
ttgaaatttgccgtttgata

SEQ ID NO: 72569 - DNA, 20 bp, synthetic construct
  misc_feature 1..20: note = Description of Artificial Sequence: Synthetic oligonucleotide
  misc_feature 1..20: note = Target: SCN10A; (+) strand; PAM type: YTN; PAM sequence: TTG
  source 1..20: mol_type = other DNA
aaatttgccgtttgatattg

SEQ ID NO: 72570 - DNA, 20 bp, synthetic construct
  misc_feature 1..20: note = Description of Artificial Sequence: Synthetic oligonucleotide
  misc_feature 1..20: note = Target: SCN10A; (+) strand; PAM type: YTN; PAM sequence: TTT
  source 1..20: mol_type = other DNA
gccgtttgatattggaatac

SEQ ID NO: 72571 - DNA, 20 bp, synthetic construct
  misc_feature 1..20: note = Description of Artificial Sequence: Synthetic oligonucleotide
  misc_feature 1..20: note = Target: SCN10A; (+) strand; PAM type: YTN; PAM sequence: TTG
  source 1..20: mol_type = other DNA
ccgtttgatattggaataca

SEQ ID NO: 72572 - DNA, 20 bp, synthetic construct
  misc_feature 1..20: note = Description of Artificial Sequence: Synthetic oligonucleotide
  misc_feature 1..20: note = Target: SCN10A; (+) strand; PAM type: YTN; PAM sequence: TTT
  source 1..20: mol_type = other DNA
gatattggaatacattctta

SEQ ID NO: 72573 - DNA, 20 bp, synthetic construct
  misc_feature 1..20: note = Description of Artificial Sequence: Synthetic oligonucleotide
  misc_feature 1..20: note = Target: SCN10A; (+) strand; PAM type: YTN; PAM sequence: TTG
  source 1..20: mol_type = other DNA
atattggaatacattcttaa

SEQ ID NO: 72574 - DNA, 20 bp, synthetic construct
  misc_feature 1..20: note = Description of Artificial Sequence: Synthetic oligonucleotide
  misc_feature 1..20: note = Target: SCN10A; (+) strand; PAM type: YTN; PAM sequence: TTG
  source 1..20: mol_type = other DNA
gaatacattcttaaataaat

SEQ ID NO: 72575 - DNA, 20 bp, synthetic construct
  misc_feature 1..20: note = Description of Artificial Sequence: Synthetic oligonucleotide
  misc_feature 1..20: note = Target: SCN10A; (+) strand; PAM type: YTN; PAM sequence: TTC
  source 1..20: mol_type = other DNA
ttaaataaatgtgaccatgt

SEQ ID NO: 72576 - DNA, 20 bp, synthetic construct
  misc_feature 1..20: note = Description of Artificial Sequence: Synthetic oligonucleotide
  misc_feature 1..20: note = Target: SCN10A; (+) strand; PAM type: YTN; PAM sequence: CTT
  source 1..20: mol_type = other DNA
aaataaatgtgaccatgtta

SEQ ID NO: 72577 - DNA, 20 bp, synthetic construct
  misc_feature 1..20: note = Description of Artificial Sequence: Synthetic oligonucleotide
  misc_feature 1..20: note = Target: SCN10A; (+) strand; PAM type: YTN; PAM sequence: TTA
  source 1..20: mol_type = other DNA
aataaatgtgaccatgttat

SEQ ID NO: 72578 - DNA, 20 bp, synthetic construct
  misc_feature 1..20: note = Description of Artificial Sequence: Synthetic oligonucleotide
  misc_feature 1..20: note = Target: SCN10A; (+) strand; PAM type: YTN; PAM sequence: TTA
  source 1..20: mol_type = other DNA
tacatcattttaatgtgcat

SEQ ID NO: 72579 - DNA, 20 bp, synthetic construct
  misc_feature 1..20: note = Description of Artificial Sequence: Synthetic oligonucleotide
  misc_feature 1..20: note = Target: SCN10A; (+) strand; PAM type: YTN; PAM sequence: TTT
  source 1..20: mol_type = other DNA
taatgtgcatttctcacttt

SEQ ID NO: 72580 - DNA, 20 bp, synthetic construct
  misc_feature 1..20: note = Description of Artificial Sequence: Synthetic oligonucleotide
  misc_feature 1..20: note = Target: SCN10A; (+) strand; PAM type: YTN; PAM sequence: TTT
  source 1..20: mol_type = other DNA
aatgtgcatttctcactttt

SEQ ID NO: 72581 - DNA, 20 bp, synthetic construct
  misc_feature 1..20: note = Description of Artificial Sequence: Synthetic oligonucleotide
  misc_feature 1..20: note = Target: SCN10A; (+) strand; PAM type: YTN; PAM sequence: TTA
  source 1..20: mol_type = other DNA
atgtgcatttctcacttttt

SEQ ID NO: 72582 - DNA, 20 bp, synthetic construct
  misc_feature 1..20: note = Description of Artificial Sequence: Synthetic oligonucleotide
  misc_feature 1..20: note = Target: SCN10A; (+) strand; PAM type: YTN; PAM sequence: TTT
  source 1..20: mol_type = other DNA
ctcacttttttttttgctaa

SEQ ID NO: 72583 - DNA, 20 bp, synthetic construct
  misc_feature 1..20: note = Description of Artificial Sequence: Synthetic oligonucleotide
  misc_feature 1..20: note = Target: SCN10A; (+) strand; PAM type: YTN; PAM sequence: TTC
  source 1..20: mol_type = other DNA
tcacttttttttttgctaat

SEQ ID NO: 72584 - DNA, 20 bp, synthetic construct
  misc_feature 1..20: note = Description of Artificial Sequence: Synthetic oligonucleotide
  misc_feature 1..20: note = Target: SCN10A; (+) strand; PAM type: YTN; PAM sequence: CTC
  source 1..20: mol_type = other DNA
acttttttttttgctaatga

SEQ ID NO: 72585 - DNA, 20 bp, synthetic construct
  misc_feature 1..20: note = Description of Artificial Sequence: Synthetic oligonucleotide
  misc_feature 1..20: note = Target: SCN10A; (+) strand; PAM type: YTN; PAM sequence: CTT
  source 1..20: mol_type = other DNA
ttttttttgctaatgactta

SEQ ID NO: 72586 - DNA, 20 bp, synthetic construct
  misc_feature 1..20: note = Description of Artificial Sequence: Synthetic oligonucleotide
  misc_feature 1..20: note = Target: SCN10A; (+) strand; PAM type: YTN; PAM sequence: TTT
  source 1..20: mol_type = other DNA
tttttttgctaatgacttat

SEQ ID NO: 72587 - DNA, 20 bp, synthetic construct
  misc_feature 1..20: note = Description of Artificial Sequence: Synthetic oligonucleotide
  misc_feature 1..20: note = Target: SCN10A; (+) strand; PAM type: YTN; PAM sequence: TTT
  source 1..20: mol_type = other DNA
ttttttgctaatgacttatt

SEQ ID NO: 72588 - DNA, 20 bp, synthetic construct
  misc_feature 1..20: note = Description of Artificial Sequence: Synthetic oligonucleotide
  misc_feature 1..20: note = Target: SCN10A; (+) strand; PAM type: YTN; PAM sequence: TTT
  source 1..20: mol_type = other DNA
tttttgctaatgacttatta

SEQ ID NO: 72589 - DNA, 20 bp, synthetic construct
  misc_feature 1..20: note = Description of Artificial Sequence: Synthetic oligonucleotide
  misc_feature 1..20: note = Target: SCN10A; (+) strand; PAM type: YTN; PAM sequence: TTT
  source 1..20: mol_type = other DNA
ttttgctaatgacttattac

SEQ ID NO: 72590 - DNA, 20 bp, synthetic construct
  misc_feature 1..20: note = Description of Artificial Sequence: Synthetic oligonucleotide
  misc_feature 1..20: note = Target: SCN10A; (+) strand; PAM type: YTN; PAM sequence: TTT
  source 1..20: mol_type = other DNA
tttgctaatgacttattact

SEQ ID NO: 72591 - DNA, 20 bp, synthetic construct
  misc_feature 1..20: note = Description of Artificial Sequence: Synthetic oligonucleotide
  misc_feature 1..20: note = Target: SCN10A; (+) strand; PAM type: YTN; PAM sequence: TTT
  source 1..20: mol_type = other DNA
ttgctaatgacttattactt

SEQ ID NO: 72592 - DNA, 20 bp, synthetic construct
  misc_feature 1..20: note = Description of Artificial Sequence: Synthetic oligonucleotide
  misc_feature 1..20: note = Target: SCN10A; (+) strand; PAM type: YTN; PAM sequence: TTT
  source 1..20: mol_type = other DNA
tgctaatgacttattacttg

SEQ ID NO: 72593 - DNA, 20 bp, synthetic construct
  misc_feature 1..20: note = Description of Artificial Sequence: Synthetic oligonucleotide
  misc_feature 1..20: note = Target: SCN10A; (+) strand; PAM type: YTN; PAM sequence: TTT
  source 1..20: mol_type = other DNA
gctaatgacttattacttgc

SEQ ID NO: 72594 - DNA, 20 bp, synthetic construct
  misc_feature 1..20: note = Description of Artificial Sequence: Synthetic oligonucleotide
  misc_feature 1..20: note = Target: SCN10A; (+) strand; PAM type: YTN; PAM sequence: TTG
  source 1..20: mol_type = other DNA
ctaatgacttattacttgct

SEQ ID NO: 72595 - DNA, 20 bp, synthetic construct
  misc_feature 1..20: note = Description of Artificial Sequence: Synthetic oligonucleotide
  misc_feature 1..20: note = Target: SCN10A; (+) strand; PAM type: YTN; PAM sequence: CTA
  source 1..20: mol_type = other DNA
atgacttattacttgctgtt

SEQ ID NO: 72596 - DNA, 20 bp, synthetic construct
  misc_feature 1..20: note = Description of Artificial Sequence: Synthetic oligonucleotide
  misc_feature 1..20: note = Target: SCN10A; (+) strand; PAM type: YTN; PAM sequence: CTT
  source 1..20: mol_type = other DNA
attacttgctgtttatttta

SEQ ID NO: 72597 - DNA, 20 bp, synthetic construct
  misc_feature 1..20: note = Description of Artificial Sequence: Synthetic oligonucleotide
  misc_feature 1..20: note = Target: SCN10A; (+) strand; PAM type: YTN; PAM sequence: TTA
  source 1..20: mol_type = other DNA
ttacttgctgtttattttat

SEQ ID NO: 72598 - DNA, 20 bp, synthetic construct
  misc_feature 1..20: note = Description of Artificial Sequence: Synthetic oligonucleotide
  misc_feature 1..20: note = Target: SCN10A; (+) strand; PAM type: YTN; PAM sequence: TTA
  source 1..20: mol_type = other DNA
cttgctgtttattttatatt

SEQ ID NO: 72599 - DNA, 20 bp, synthetic construct
  misc_feature 1..20: note = Description of Artificial Sequence: Synthetic oligonucleotide
  misc_feature 1..20: note = Target: SCN10A; (+) strand; PAM type: YTN; PAM sequence: CTT
  source 1..20: mol_type = other DNA
gctgtttattttatatttat

SEQ ID NO: 72600 - DNA, 20 bp, synthetic construct
  misc_feature 1..20: note = Description of Artificial Sequence: Synthetic oligonucleotide
  misc_feature 1..20: note = Target: SCN10A; (+) strand; PAM type: YTN; PAM sequence: TTG
  source 1..20: mol_type = other DNA
ctgtttattttatatttatt

SEQ ID NO: 72601 - DNA, 20 bp, synthetic construct
  misc_feature 1..20: note = Description of Artificial Sequence: Synthetic oligonucleotide
  misc_feature 1..20: note = Target: SCN10A; (+) strand; PAM type: YTN; PAM sequence: CTG
  source 1..20: mol_type = other DNA
tttattttatatttatttta

SEQ ID NO: 72602 - DNA, 20 bp, synthetic construct
  misc_feature 1..20: note = Description of Artificial Sequence: Synthetic oligonucleotide
  misc_feature 1..20: note = Target: SCN10A; (+) strand; PAM type: YTN; PAM sequence: TTT
  source 1..20: mol_type = other DNA
attttatatttattttagac

SEQ ID NO: 72603 - DNA, 20 bp, synthetic construct
  misc_feature 1..20: note = Description of Artificial Sequence: Synthetic oligonucleotide
  misc_feature 1..20: note = Target: SCN10A; (+) strand; PAM type: YTN; PAM sequence: TTA
  source 1..20: mol_type = other DNA
ttttatatttattttagact

SEQ ID NO: 72604 - DNA, 20 bp, synthetic construct
  misc_feature 1..20: note = Description of Artificial Sequence: Synthetic oligonucleotide
  misc_feature 1..20: note = Target: SCN10A; (+) strand; PAM type: YTN; PAM sequence: TTT
  source 1..20: mol_type = other DNA
tatatttattttagactatg

SEQ ID NO: 72605 - DNA, 20 bp, synthetic construct
  misc_feature 1..20: note = Description of Artificial Sequence: Synthetic oligonucleotide
  misc_feature 1..20: note = Target: SCN10A; (+) strand; PAM type: YTN; PAM sequence: TTT
  source 1..20: mol_type = other DNA
atatttattttagactatgg

SEQ ID NO: 72606 - DNA, 20 bp, synthetic construct
  misc_feature 1..20: note = Description of Artificial Sequence: Synthetic oligonucleotide
  misc_feature 1..20: note = Target: SCN10A; (+) strand; PAM type: YTN; PAM sequence: TTA
  source 1..20: mol_type = other DNA
tatttattttagactatgga

SEQ ID NO: 72607 - DNA, 20 bp, synthetic construct
  misc_feature 1..20: note = Description of Artificial Sequence: Synthetic oligonucleotide
  misc_feature 1..20: note = Target: SCN10A; (+) strand; PAM type: YTN; PAM sequence: TTT
  source 1..20: mol_type = other DNA
attttagactatggaaatta

SEQ ID NO: 72608 - DNA, 20 bp, synthetic construct
  misc_feature 1..20: note = Description of Artificial Sequence: Synthetic oligonucleotide
  misc_feature 1..20: note = Target: SCN10A; (+) strand; PAM type: YTN; PAM sequence: TTA
  source 1..20: mol_type = other DNA
ttttagactatggaaattat

SEQ ID NO: 72609 - DNA, 20 bp, synthetic construct
  misc_feature 1..20: note = Description of Artificial Sequence: Synthetic oligonucleotide
  misc_feature 1..20: note = Target: SCN10A; (+) strand; PAM type: YTN; PAM sequence: TTT
  source 1..20: mol_type = other DNA
tagactatggaaattatgtt

SEQ ID NO: 72610 - DNA, 20 bp, synthetic construct
  misc_feature 1..20: note = Description of Artificial Sequence: Synthetic oligonucleotide
  misc_feature 1..20: note = Target: SCN10A; (+) strand; PAM type: YTN; PAM sequence: TTT
  source 1..20: mol_type = other DNA
agactatggaaattatgtta

SEQ ID NO: 72611 - DNA, 20 bp, synthetic construct
  misc_feature 1..20: note = Description of Artificial Sequence: Synthetic oligonucleotide
  misc_feature 1..20: note = Target: SCN10A; (+) strand; PAM type: YTN; PAM sequence: TTA
  source 1..20: mol_type = other DNA
gactatggaaattatgttat

SEQ ID NO: 72612 - DNA, 20 bp, synthetic construct
  misc_feature 1..20: note = Description of Artificial Sequence: Synthetic oligonucleotide
  misc_feature 1..20: note = Target: SCN10A; (+) strand; PAM type: YTN; PAM sequence: CTA
  source 1..20: mol_type = other DNA
tggaaattatgttatacaaa

SEQ ID NO: 72613 - DNA, 20 bp, synthetic construct
  misc_feature 1..20: note = Description of Artificial Sequence: Synthetic oligonucleotide
  misc_feature 1..20: note = Target: SCN10A; (+) strand; PAM type: YTN; PAM sequence: TTA
  source 1..20: mol_type = other DNA
tgttatacaaaaagcaaatt

SEQ ID NO: 72614 - DNA, 20 bp, synthetic construct
  misc_feature 1..20: note = Description of Artificial Sequence: Synthetic oligonucleotide
  misc_feature 1..20: note = Target: SCN10A; (+) strand; PAM type: YTN; PAM sequence: TTA
  source 1..20: mol_type = other DNA
tacaaaaagcaaattcgagc

SEQ ID NO: 72615 - DNA, 20 bp, synthetic construct
  misc_feature 1..20: note = Description of Artificial Sequence: Synthetic oligonucleotide
  misc_feature 1..20: note = Target: SCN10A; (+) strand; PAM type: YTN; PAM sequence: TTC
  source 1..20: mol_type = other DNA
gagcgattttcttatttgag

SEQ ID NO: 72616 - DNA, 20 bp, synthetic construct
  misc_feature 1..20: note = Description of Artificial Sequence: Synthetic oligonucleotide
  misc_feature 1..20: note = Target: SCN10A; (+) strand; PAM type: YTN; PAM sequence: TTT
  source 1..20: mol_type = other DNA
tcttatttgagttcaaaatg

SEQ ID NO: 72617 - DNA, 20 bp, synthetic construct
  misc_feature 1..20: note = Description of Artificial Sequence: Synthetic oligonucleotide
  misc_feature 1..20: note = Target: SCN10A; (+) strand; PAM type: YTN; PAM sequence: TTT
  source 1..20: mol_type = other DNA
cttatttgagttcaaaatgg

SEQ ID NO: 72618 - DNA, 20 bp, synthetic construct
  misc_feature 1..20: note = Description of Artificial Sequence: Synthetic oligonucleotide
  misc_feature 1..20: note = Target: SCN10A; (+) strand; PAM type: YTN; PAM sequence: TTC
  source 1..20: mol_type = other DNA
ttatttgagttcaaaatggg

SEQ ID NO: 72619 - DNA, 20 bp, synthetic construct
  misc_feature 1..20: note = Description of Artificial Sequence: Synthetic oligonucleotide
  misc_feature 1..20: note = Target: SCN10A; (+) strand; PAM type: YTN; PAM sequence: CTT
  source 1..20: mol_type = other DNA
atttgagttcaaaatgggtt

SEQ ID NO: 72620 - DNA, 20 bp, synthetic construct
  misc_feature 1..20: note = Description of Artificial Sequence: Synthetic oligonucleotide
  misc_feature 1..20: note = Target: SCN10A; (+) strand; PAM type: YTN; PAM sequence: TTA
  source 1..20: mol_type = other DNA
tttgagttcaaaatgggttg

SEQ ID NO: 72621 - DNA, 20 bp, synthetic construct
  misc_feature 1..20: note = Description of Artificial Sequence: Synthetic oligonucleotide
  misc_feature 1..20: note = Target: SCN10A; (+) strand; PAM type: YTN; PAM sequence: TTT
  source 1..20: mol_type = other DNA
gagttcaaaatgggttgtaa

SEQ ID NO: 72622 - DNA, 20 bp, synthetic construct
  misc_feature 1..20: note = Description of Artificial Sequence: Synthetic oligonucleotide
  misc_feature 1..20: note = Target: SCN10A; (+) strand; PAM type: YTN; PAM sequence: TTG
  source 1..20: mol_type = other DNA
agttcaaaatgggttgtaaa

SEQ ID NO: 72623 - DNA, 20 bp, synthetic construct
  misc_feature 1..20: note = Description of Artificial Sequence: Synthetic oligonucleotide
  misc_feature 1..20: note = Target: SCN10A; (+) strand; PAM type: YTN; PAM sequence: TTC
  source 1..20: mol_type = other DNA
aaaatgggttgtaaagcagc

SEQ ID NO: 72624 - DNA, 20 bp, synthetic construct
  misc_feature 1..20: note = Description of Artificial Sequence: Synthetic oligonucleotide
  misc_feature 1..20: note = Target: SCN10A; (+) strand; PAM type: YTN; PAM sequence: TTG
  source 1..20: mol_type = other DNA
taaagcagcagagacaactc

SEQ ID NO: 72625 - DNA, 20 bp, synthetic construct
  misc_feature 1..20: note = Description of Artificial Sequence: Synthetic oligonucleotide
  misc_feature 1..20: note = Target: SCN10A; (+) strand; PAM type: YTN; PAM sequence: CTC
  source 1..20: mol_type = other DNA
aacatcaacaacgcatttgg

SEQ ID NO: 72626 - DNA, 20 bp, synthetic construct
  misc_feature 1..20: note = Description of Artificial Sequence: Synthetic oligonucleotide
  misc_feature 1..20: note = Target: SCN10A; (+) strand; PAM type: YTN; PAM sequence: TTT
  source 1..20: mol_type = other DNA
ggcccagggattgctaacaa

SEQ ID NO: 72627 - DNA, 20 bp, synthetic construct
  misc_feature 1..20: note = Description of Artificial Sequence: Synthetic oligonucleotide
  misc_feature 1..20: note = Target: SCN10A; (+) strand; PAM type: YTN; PAM sequence: TTG
  source 1..20: mol_type = other DNA
gcccagggattgctaacaaa

SEQ ID NO: 72628 - DNA, 20 bp, synthetic construct
  misc_feature 1..20: note = Description of Artificial Sequence: Synthetic oligonucleotide
  misc_feature 1..20: note = Target: SCN10A; (+) strand; PAM type: YTN; PAM sequence: TTG
  source 1..20: mol_type = other DNA
ctaacaaaggtacagtgcag

SEQ ID NO: 72629 - DNA, 20 bp, synthetic construct
  misc_feature 1..20: note = Description of Artificial Sequence: Synthetic oligonucleotide
  misc_feature 1..20: note = Target: SCN10A; (+) strand; PAM type: YTN; PAM sequence: CTA
  source 1..20: mol_type = other DNA
acaaaggtacagtgcagtgg

SEQ ID NO: 72630 - DNA, 20 bp, synthetic construct
  misc_feature 1..20: note = Description of Artificial Sequence: Synthetic oligonucleotide
  misc_feature 1..20: note = Target: SCN10A; (+) strand; PAM type: YTN; PAM sequence: TTC
  source 1..20: mol_type = other DNA
aagaagttttgcaaaggaga

SEQ ID NO: 72631 - DNA, 20 bp, synthetic construct
  misc_feature 1..20: note = Description of Artificial Sequence: Synthetic oligonucleotide
  misc_feature 1..20: note = Target: SCN10A; (+) strand; PAM type: YTN; PAM sequence: TTT
  source 1..20: mol_type = other DNA
tgcaaaggagatgagaacct

SEQ ID NO: 72632 - DNA, 20 bp, synthetic construct
  misc_feature 1..20: note = Description of Artificial Sequence: Synthetic oligonucleotide
  misc_feature 1..20: note = Target: SCN10A; (+) strand; PAM type: YTN; PAM sequence: TTT
  source 1..20: mol_type = other DNA
gcaaaggagatgagaacctt

SEQ ID NO: 72633 - DNA, 20 bp, synthetic construct
  misc_feature 1..20: note = Description of Artificial Sequence: Synthetic oligonucleotide
  misc_feature 1..20: note = Target: SCN10A; (+) strand; PAM type: YTN; PAM sequence: TTG
  source 1..20: mol_type = other DNA
caaaggagatgagaaccttg

SEQ ID NO: 72634 - DNA, 20 bp, synthetic construct
  misc_feature 1..20: note = Description of Artificial Sequence: Synthetic oligonucleotide
  misc_feature 1..20: note = Target: SCN10A; (+) strand; PAM type: YTN; PAM sequence: CTT
  source 1..20: mol_type = other DNA
gaagatgaggagagtagtgg

SEQ ID NO: 72635 - DNA, 20 bp, synthetic construct
  misc_feature 1..20: note = Description of Artificial Sequence: Synthetic oligonucleotide
  misc_feature 1..20: note = Target: SCN10A; (+) strand; PAM type: YTN; PAM sequence: TTG
  source 1..20: mol_type = other DNA
aagatgaggagagtagtggc

SEQ ID NO: 72636 - DNA, 20 bp, synthetic construct
  misc_feature 1..20: note = Description of Artificial Sequence: Synthetic oligonucleotide
  misc_feature 1..20: note = Target: SCN10A; (+) strand; PAM type: YTN; PAM sequence: CTG
  source 1..20: mol_type = other DNA
gccattggaagttgacaatg

SEQ ID NO: 72637 - DNA, 20 bp, synthetic construct
  misc_feature 1..20: note = Description of Artificial Sequence: Synthetic oligonucleotide
  misc_feature 1..20: note = Target: SCN10A; (+) strand; PAM type: YTN; PAM sequence: TTG
  source 1..20: mol_type = other DNA
gaagttgacaatgaccaatt

SEQ ID NO: 72638 - DNA, 20 bp, synthetic construct
  misc_feature 1..20: note = Description of Artificial Sequence: Synthetic oligonucleotide
  misc_feature 1..20: note = Target: SCN10A; (+) strand; PAM type: YTN; PAM sequence: TTG
  source 1..20: mol_type = other DNA
acaatgaccaattgagagca

SEQ ID NO: 72639 - DNA, 20 bp, synthetic construct
  misc_feature 1..20: note = Description of Artificial Sequence: Synthetic oligonucleotide
  misc_feature 1..20: note = Target: SCN10A; (+) strand; PAM type: YTN; PAM sequence: TTG
  source 1..20: mol_type = other DNA
agagcaatcatcgaagttga

SEQ ID NO: 72640 - DNA, 20 bp, synthetic construct
  misc_feature 1..20: note = Description of Artificial Sequence: Synthetic oligonucleotide
  misc_feature 1..20: note = Target: SCN10A; (+) strand; PAM type: YTN; PAM sequence: TTG
  source 1..20: mol_type = other DNA
atcctcttacaactgcacaa

SEQ ID NO: 72641 - DNA, 20 bp, synthetic construct
  misc_feature 1..20: note = Description of Artificial Sequence: Synthetic oligonucleotide
  misc_feature 1..20: note = Target: SCN10A; (+) strand; PAM type: YTN; PAM sequence: CTC
  source 1..20: mol_type = other DNA
ttacaactgcacaagaagct

SEQ ID NO: 72642 - DNA, 20 bp, synthetic construct
  misc_feature 1..20: note = Description of Artificial Sequence: Synthetic oligonucleotide
  misc_feature 1..20: note = Target: SCN10A; (+) strand; PAM type: YTN; PAM sequence: CTT
  source 1..20: mol_type = other DNA
acaactgcacaagaagctga

SEQ ID NO: 72643 - DNA, 20 bp, synthetic construct
  misc_feature 1..20: note = Description of Artificial Sequence: Synthetic oligonucleotide
  misc_feature 1..20: note = Target: SCN10A; (+) strand; PAM type: YTN; PAM sequence: TTA
  source 1..20: mol_type = other DNA
caactgcacaagaagctgag

SEQ ID NO: 72644 - DNA, 20 bp, synthetic construct
  misc_feature 1..20: note = Description of Artificial Sequence: Synthetic oligonucleotide
  misc_feature 1..20: note = Target: SCN10A; (+) strand; PAM type: YTN; PAM sequence: CTG
  source 1..20: mol_type = other DNA
cacaagaagctgaggaagaa

SEQ ID NO: 72645 - DNA, 20 bp, synthetic construct
  misc_feature 1..20: note = Description of Artificial Sequence: Synthetic oligonucleotide
  misc_feature 1..20: note = Target: SCN10A; (+) strand; PAM type: YTN; PAM sequence: CTG
  source 1..20: mol_type = other DNA
aggaagaactcatcgttgac

SEQ ID NO: 72646 - DNA, 20 bp, synthetic construct
  misc_feature 1..20: note = Description of Artificial Sequence: Synthetic oligonucleotide
  misc_feature 1..20: note = Target: SCN10A; (+) strand; PAM type: YTN; PAM sequence: CTC
  source 1..20: mol_type = other DNA
atcgttgaccattctacggt

SEQ ID NO: 72647 - DNA, 20 bp, synthetic construct
  misc_feature 1..20: note = Description of Artificial Sequence: Synthetic oligonucleotide
  misc_feature 1..20: note = Target: SCN10A; (+) strand; PAM type: YTN; PAM sequence: TTG
  source 1..20: mol_type = other DNA
accattctacggtcattcgg

SEQ ID NO: 72648 - DNA, 20 bp, synthetic construct
  misc_feature 1..20: note = Description of Artificial Sequence: Synthetic oligonucleotide
  misc_feature 1..20: note = Target: SCN10A; (+) strand; PAM type: YTN; PAM sequence: TTC
  source 1..20: mol_type = other DNA
tacggtcattcggcagttga

SEQ ID NO: 72649 - DNA, 20 bp, synthetic construct
  misc_feature 1..20: note = Description of Artificial Sequence: Synthetic oligonucleotide
  misc_feature 1..20: note = Target: SCN10A; (+) strand; PAM type: YTN; PAM sequence: CTA
  source 1..20: mol_type = other DNA
cggtcattcggcagttgaag

SEQ ID NO: 72650 - DNA, 20 bp, synthetic construct
  misc_feature 1..20: note = Description of Artificial Sequence: Synthetic oligonucleotide
  misc_feature 1..20: note = Target: SCN10A; (+) strand; PAM type: YTN; PAM sequence: TTC
  source 1..20: mol_type = other DNA
ggcagttgaagcaaattgga

SEQ ID NO: 72651 - DNA, 20 bp, synthetic construct
  misc_feature 1..20: note = Description of Artificial Sequence: Synthetic oligonucleotide
  misc_feature 1..20: note = Target: SCN10A; (+) strand; PAM type: YTN; PAM sequence: TTG
  source 1..20: mol_type = other DNA
aagcaaattggaaaggtgaa

SEQ ID NO: 72652 - DNA, 20 bp, synthetic construct
  misc_feature 1..20: note = Description of Artificial Sequence: Synthetic oligonucleotide
  misc_feature 1..20: note = Target: SCN10A; (+) strand; PAM type: YTN; PAM sequence: TTG
  source 1..20: mol_type = other DNA
gaaaggtgaaacagctccat

SEQ ID NO: 72653 - DNA, 20 bp, synthetic construct
  misc_feature 1..20: note = Description of Artificial Sequence: Synthetic oligonucleotide
  misc_feature 1..20: note = Target: SCN10A; (+) strand; PAM type: YTN; PAM sequence: CTC
  source 1..20: mol_type = other DNA
cataaatgggtgcctcataa

SEQ ID NO: 72654 - DNA, 20 bp, synthetic construct
  misc_feature 1..20: note = Description of Artificial Sequence: Synthetic oligonucleotide
  misc_feature 1..20: note = Target: SCN10A; (+) strand; PAM type: YTN; PAM sequence: CTC
  source 1..20: mol_type = other DNA
ataagctaaggaaaaatgtt

SEQ ID NO: 72655 - DNA, 20 bp, synthetic construct
  misc_feature 1..20: note = Description of Artificial Sequence: Synthetic oligonucleotide
  misc_feature 1..20: note = Target: SCN10A; (+) strand; PAM type: YTN; PAM sequence: CTA
  source 1..20: mol_type = other DNA
aggaaaaatgtttaaaaaat

SEQ ID NO: 72656 - DNA, 20 bp, synthetic construct
  misc_feature 1..20: note = Description of Artificial Sequence: Synthetic oligonucleotide
  misc_feature 1..20: note = Target: SCN10A; (+) strand; PAM type: YTN; PAM sequence: TTT
  source 1..20: mol_type = other DNA
aaaaaatcgtcattttgaag

SEQ ID NO: 72657 - DNA, 20 bp, synthetic construct
  misc_feature 1..20: note = Description of Artificial Sequence: Synthetic oligonucleotide
  misc_feature 1..20: note = Target: SCN10A; (+) strand; PAM type: YTN; PAM sequence: TTA
  source 1..20: mol_type = other DNA
aaaaatcgtcattttgaagt

SEQ ID NO: 72658 - DNA, 20 bp, synthetic construct
  misc_feature 1..20: note = Description of Artificial Sequence: Synthetic oligonucleotide
  misc_feature 1..20: note = Target: SCN10A; (+) strand; PAM type: YTN; PAM sequence: TTT
  source 1..20: mol_type = other DNA
tgaagtgttgtcgtctctta

SEQ ID NO: 72659 - DNA, 20 bp, synthetic construct
  misc_feature 1..20: note = Description of Artificial Sequence: Synthetic oligonucleotide
  misc_feature 1..20: note = Target: SCN10A; (+) strand; PAM type: YTN; PAM sequence: TTT
  source 1..20: mol_type = other DNA
gaagtgttgtcgtctcttat

SEQ ID NO: 72660 - DNA, 20 bp, synthetic construct
  misc_feature 1..20: note = Description of Artificial Sequence: Synthetic oligonucleotide
  misc_feature 1..20: note = Target: SCN10A; (+) strand; PAM type: YTN; PAM sequence: TTG
  source 1..20: mol_type = other DNA
aagtgttgtcgtctcttatt

SEQ ID NO: 72661 - DNA, 20 bp, synthetic construct
  misc_feature 1..20: note = Description of Artificial Sequence: Synthetic oligonucleotide
  misc_feature 1..20: note = Target: SCN10A; (+) strand; PAM type: YTN; PAM sequence: TTG
  source 1..20: mol_type = other DNA
tcgtctcttattctatgcaa

SEQ ID NO: 72662 - DNA, 20 bp, synthetic construct
  misc_feature 1..20: note = Description of Artificial Sequence: Synthetic oligonucleotide
  misc_feature 1..20: note = Target: SCN10A; (+) strand; PAM type: YTN; PAM sequence: CTC
  source 1..20: mol_type = other DNA
ttattctatgcaacaaaaat

SEQ ID NO: 72663 - DNA, 20 bp, synthetic construct
  misc_feature 1..20: note = Description of Artificial Sequence: Synthetic oligonucleotide
  misc_feature 1..20: note = Target: SCN10A; (+) strand; PAM type: YTN; PAM sequence: CTT
  source 1..20: mol_type = other DNA
attctatgcaacaaaaatga

SEQ ID NO: 72664 - DNA, 20 bp, synthetic construct
  misc_feature 1..20: note = Description of Artificial Sequence: Synthetic oligonucleotide
  misc_feature 1..20: note = Target: SCN10A; (+) strand; PAM type: YTN; PAM sequence: TTA
  source 1..20: mol_type = other DNA
ttctatgcaacaaaaatgaa

SEQ ID NO: 72665 - DNA, 20 bp, synthetic construct
  misc_feature 1..20: note = Description of Artificial Sequence: Synthetic oligonucleotide
  misc_feature 1..20: note = Target: SCN10A; (+) strand; PAM type: YTN; PAM sequence: TTC
  source 1..20: mol_type = other DNA
tatgcaacaaaaatgaacta

SEQ ID NO: 72666 - DNA, 20 bp, synthetic construct
  misc_feature 1..20: note = Description of Artificial Sequence: Synthetic oligonucleotide
  misc_feature 1..20: note = Target: SCN10A; (+) strand; PAM type: YTN; PAM sequence: CTA
  source 1..20: mol_type = other DNA
tgcaacaaaaatgaactatt

SEQ ID NO: 72667 - DNA, 20 bp, synthetic construct
  misc_feature 1..20: note = Description of Artificial Sequence: Synthetic oligonucleotide
  misc_feature 1..20: note = Target: SCN10A; (+) strand; PAM type: YTN; PAM sequence: CTA
  source 1..20: mol_type = other DNA
tttcttaatcagattgtgat

SEQ ID NO: 72668 - DNA, 20 bp, synthetic construct
  misc_feature 1..20: note = Description of Artificial Sequence: Synthetic oligonucleotide
  misc_feature 1..20: note = Target: SCN10A; (+) strand; PAM type: YTN; PAM sequence: TTT
  source 1..20: mol_type = other DNA
cttaatcagattgtgatgtg

SEQ ID NO: 72669 - DNA, 20 bp, synthetic construct
  misc_feature 1..20: note = Description of Artificial Sequence: Synthetic oligonucleotide
  misc_feature 1..20: note = Target: SCN10A; (+) strand; PAM type: YTN; PAM sequence: TTC
  source 1..20: mol_type = other DNA
ttaatcagattgtgatgtgc

SEQ ID NO: 72670 - DNA, 20 bp, synthetic construct
  misc_feature 1..20: note = Description of Artificial Sequence: Synthetic oligonucleotide
  misc_feature 1..20: note = Target: SCN10A; (+) strand; PAM type: YTN; PAM sequence: CTT
  source 1..20: mol_type = other DNA
aatcagattgtgatgtgcga

SEQ ID NO: 72671 - DNA, 20 bp, synthetic construct
  misc_feature 1..20: note = Description of Artificial Sequence: Synthetic oligonucleotide
  misc_feature 1..20: note = Target: SCN10A; (+) strand; PAM type: YTN; PAM sequence: TTA
  source 1..20: mol_type = other DNA
atcagattgtgatgtgcgat

SEQ ID NO: 72672 - DNA, 20 bp, synthetic construct
  misc_feature 1..20: note = Description of Artificial Sequence: Synthetic oligonucleotide
  misc_feature 1..20: note = Target: SCN10A; (+) strand; PAM type: YTN; PAM sequence: TTG
  source 1..20: mol_type = other DNA
tgatgtgcgataaaaagtga

SEQ ID NO: 72673 - DNA, 20 bp, synthetic construct
  misc_feature 1..20: note = Description of Artificial Sequence: Synthetic oligonucleotide
  misc_feature 1..20: note = Target: SCN10A; (+) strand; PAM type: YTN; PAM sequence: TTT
  source 1..20: mol_type = other DNA
tacttgacaactggcaatga

SEQ ID NO: 72674 - DNA, 20 bp, synthetic construct
  misc_feature 1..20: note = Description of Artificial Sequence: Synthetic oligonucleotide
  misc_feature 1..20: note = Target: SCN10A; (+) strand; PAM type: YTN; PAM sequence: TTT
  source 1..20: mol_type = other DNA
acttgacaactggcaatgac

SEQ ID NO: 72675 - DNA, 20 bp, synthetic construct
  misc_feature 1..20: note = Description of Artificial Sequence: Synthetic oligonucleotide
  misc_feature 1..20: note = Target: SCN10A; (+) strand; PAM type: YTN; PAM sequence: TTA
  source 1..20: mol_type = other DNA
cttgacaactggcaatgacc

SEQ ID NO: 72676 - DNA, 20 bp, synthetic construct
  misc_feature 1..20: note = Description of Artificial Sequence: Synthetic oligonucleotide
  misc_feature 1..20: note = Target: SCN10A; (+) strand; PAM type: YTN; PAM sequence: CTT
  source 1..20: mol_type = other DNA
gacaactggcaatgaccagc

SEQ ID NO: 72677 - DNA, 20 bp, synthetic construct
  misc_feature 1..20: note = Description of Artificial Sequence: Synthetic oligonucleotide
  misc_feature 1..20: note = Target: SCN10A; (+) strand; PAM type: YTN; PAM sequence: TTG
  source 1..20: mol_type = other DNA
acaactggcaatgaccagct

SEQ ID NO: 72678 - DNA, 20 bp, synthetic construct
  misc_feature 1..20: note = Description of Artificial Sequence: Synthetic oligonucleotide
  misc_feature 1..20: note = Target: SCN10A; (+) strand; PAM type: YTN; PAM sequence: CTG
  source 1..20: mol_type = other DNA
gcaatgaccagcttggtggc

SEQ ID NO: 72679 - DNA, 20 bp, synthetic construct
  misc_feature 1..20: note = Description of Artificial Sequence: Synthetic oligonucleotide
  misc_feature 1..20: note = Target: SCN10A; (+) strand; PAM type: YTN; PAM sequence: CTT
  source 1..20: mol_type = other DNA
ggtggctggactgagaagaa

SEQ ID NO: 72680 - DNA, 20 bp, synthetic construct
  misc_feature 1..20: note = Description of Artificial Sequence: Synthetic oligonucleotide
  misc_feature 1..20: note = Target: SCN10A; (+) strand; PAM type: YTN; PAM sequence: TTG
  source 1..20: mol_type = other DNA
gtggctggactgagaagaag

SEQ ID NO: 72681 - DNA, 20 bp, synthetic construct
  misc_feature 1..20: note = Description of Artificial Sequence: Synthetic oligonucleotide
  misc_feature 1..20: note = Target: SCN10A; (+) strand; PAM type: YTN; PAM sequence: CTG
  source 1..20: mol_type = other DNA
gactgagaagaagctccaaa

SEQ ID NO: 72682 - DNA, 20 bp, synthetic construct
  misc_feature 1..20: note = Description of Artificial Sequence: Synthetic oligonucleotide
  misc_feature 1..20: note = Target: SCN10A; (+) strand; PAM type: YTN; PAM sequence: CTG
  source 1..20: mol_type = other DNA
agaagaagctccaaagcact

SEQ ID NO: 72683 - DNA, 20 bp, synthetic construct
  misc_feature 1..20: note = Description of Artificial Sequence: Synthetic oligonucleotide
  misc_feature 1..20: note = Target: SCN10A; (+) strand; PAM type: YTN; PAM sequence: CTC
  source 1..20: mol_type = other DNA
caaagcacttcccaaaaccc

SEQ ID NO: 72684 - DNA, 20 bp, synthetic construct
  misc_feature 1..20: note = Description of Artificial Sequence: Synthetic oligonucleotide
  misc_feature 1..20: note = Target: SCN10A; (+) strand; PAM type: YTN; PAM sequence: CTT
  source 1..20: mol_type = other DNA
cccaaaacccaacttgcacc

SEQ ID NO: 72685 - DNA, 20 bp, synthetic construct
  misc_feature 1..20: note = Description of Artificial Sequence: Synthetic oligonucleotide
  misc_feature 1..20: note = Target: SCN10A; (+) strand; PAM type: YTN; PAM sequence: TTC
  source 1..20: mol_type = other DNA
ccaaaacccaacttgcacca

SEQ ID NO: 72686 - DNA, 20 bp, synthetic construct
  misc_feature 1..20: note = Description of Artificial Sequence: Synthetic oligonucleotide
  misc_feature 1..20: note = Target: SCN10A; (+) strand; PAM type: YTN; PAM sequence: CTT
  source 1..20: mol_type = other DNA
gcaccaaaaaaagtcgtggt

SEQ ID NO: 72687 - DNA, 20 bp, synthetic construct
  misc_feature 1..20: note = Description of Artificial Sequence: Synthetic oligonucleotide
  misc_feature 1..20: note = Target: SCN10A; (+) strand; PAM type: YTN; PAM sequence: TTG
  source 1..20: mol_type = other DNA
caccaaaaaaagtcgtggtc

SEQ ID NO: 72688 - DNA, 20 bp, synthetic construct
  misc_feature 1..20: note = Description of Artificial Sequence: Synthetic oligonucleotide
  misc_feature 1..20: note = Target: SCN10A; (+) strand; PAM type: YTN; PAM sequence: CTG
  source 1..20: mol_type = other DNA
cttggtggtctgctgccggt

SEQ ID NO: 72689 - DNA, 20 bp, synthetic construct
  misc_feature 1..20: note = Description of Artificial Sequence: Synthetic oligonucleotide
  misc_feature 1..20: note = Target: SCN10A; (+) strand; PAM type: YTN; PAM sequence: CTT
  source 1..20: mol_type = other DNA
ggtggtctgctgccggtctg

SEQ ID NO: 72690 - DNA, 20 bp, synthetic construct
  misc_feature 1..20: note = Description of Artificial Sequence: Synthetic oligonucleotide
  misc_feature 1..20: note = Target: SCN10A; (+) strand; PAM type: YTN; PAM sequence: TTG
  source 1..20: mol_type = other DNA
gtggtctgctgccggtctga

SEQ ID NO: 72691 - DNA, 20 bp, synthetic construct
  misc_feature 1..20: note = Description of Artificial Sequence: Synthetic oligonucleotide
  misc_feature 1..20: note = Target: SCN10A; (+) strand; PAM type: YTN; PAM sequence: CTG
  source 1..20: mol_type = other DNA
ctgccggtctgatctactac

SEQ ID NO: 72692 - DNA, 20 bp, synthetic construct
  misc_feature 1..20: note = Description of Artificial Sequence: Synthetic oligonucleotide
  misc_feature 1..20: note = Target: SCN10A; (+) strand; PAM type: YTN; PAM sequence: CTG
  source 1..20: mol_type = other DNA
ccggtctgatctactacagc

SEQ ID NO: 72693 - DNA, 20 bp, synthetic construct
  misc_feature 1..20: note = Description of Artificial Sequence: Synthetic oligonucleotide
  misc_feature 1..20: note = Target: SCN10A; (+) strand; PAM type: YTN; PAM sequence: CTG
  source 1..20: mol_type = other DNA
atctactacagctttctgaa

SEQ ID NO: 72694 - DNA, 20 bp, synthetic construct
  misc_feature 1..20: note = Description of Artificial Sequence: Synthetic oligonucleotide
  misc_feature 1..20: note = Target: SCN10A; (+) strand; PAM type: YTN; PAM sequence: CTA
  source 1..20: mol_type = other DNA
ctacagctttctgaatccca

SEQ ID NO: 72695 - DNA, 20 bp, synthetic construct
  misc_feature 1..20: note = Description of Artificial Sequence: Synthetic oligonucleotide
  misc_feature 1..20: note = Target: SCN10A; (+) strand; PAM type: YTN; PAM sequence: CTA
  source 1..20: mol_type = other DNA
cagctttctgaatcccagca

SEQ ID NO: 72696 - DNA, 20 bp, synthetic construct
  misc_feature 1..20: note = Description of Artificial Sequence: Synthetic oligonucleotide
  misc_feature 1..20: note = Target: SCN10A; (+) strand; PAM type: YTN; PAM sequence: CTT
  source 1..20: mol_type = other DNA
tctgaatcccagcaaagcca

SEQ ID NO: 72697 - DNA, 20 bp, synthetic construct
  misc_feature 1..20: note = Description of Artificial Sequence: Synthetic oligonucleotide
  misc_feature 1..20: note = Target: SCN10A; (+) strand; PAM type: YTN; PAM sequence: TTT
  source 1..20: mol_type = other DNA
ctgaatcccagcaaagccat

SEQ ID NO: 72698 - DNA, 20 bp, synthetic construct
  misc_feature 1..20: note = Description of Artificial Sequence: Synthetic oligonucleotide
  misc_feature 1..20: note = Target: SCN10A; (+) strand; PAM type: YTN; PAM sequence: TTC
  source 1..20: mol_type = other DNA
tgaatcccagcaaagccatt

SEQ ID NO: 72699 - DNA, 20 bp, synthetic construct
  misc_feature 1..20: note = Description of Artificial Sequence: Synthetic oligonucleotide
  misc_feature 1..20: note = Target: SCN10A; (+) strand; PAM type: YTN; PAM sequence: CTG
  source 1..20: mol_type = other DNA
aatcccagcaaagccattac

SEQ ID NO: 72700 - DNA, 20 bp, synthetic construct
  misc_feature 1..20: note = Description of Artificial Sequence: Synthetic oligonucleotide
  misc_feature 1..20: note = Target: SCN10A; (+) strand; PAM type: YTN; PAM sequence: TTA
  source 1..20: mol_type = other DNA
catctgagaaatatgttcag

SEQ ID NO: 72701 - DNA, 20 bp, synthetic construct
  misc_feature 1..20: note = Description of Artificial Sequence: Synthetic oligonucleotide
  misc_feature 1..20: note = Target: SCN10A; (+) strand; PAM type: YTN; PAM sequence: CTG
  source 1..20: mol_type = other DNA
agaaatatgttcagcaaatc

SEQ ID NO: 72702 - DNA, 20 bp, synthetic construct
  misc_feature 1..20: note = Description of Artificial Sequence: Synthetic oligonucleotide
  misc_feature 1..20: note = Target: SCN10A; (+) strand; PAM type: YTN; PAM sequence: TTC
  source 1..20: mol_type = other DNA
agcaaatcgatgagatgcac

SEQ ID NO: 72703 - DNA, 20 bp, synthetic construct
  misc_feature 1..20: note = Description of Artificial Sequence: Synthetic oligonucleotide
  misc_feature 1..20: note = Target: SCN10A; (+) strand; PAM type: YTN; PAM sequence: CTG
  source 1..20: mol_type = other DNA
caaggcctgcagctggcatt

SEQ ID NO: 72704 - DNA, 20 bp, synthetic construct
  misc_feature 1..20: note = Description of Artificial Sequence: Synthetic oligonucleotide
  misc_feature 1..20: note = Target: SCN10A; (+) strand; PAM type: YTN; PAM sequence: CTG
  source 1..20: mol_type = other DNA
cagctggcattggtcaacag

SEQ ID NO: 72705 - DNA, 20 bp, synthetic construct
  misc_feature 1..20: note = Description of Artificial Sequence: Synthetic oligonucleotide
  misc_feature 1..20: note = Target: SCN10A; (+) strand; PAM type: YTN; PAM sequence: CTG
  source 1..20: mol_type = other DNA
gcattggtcaacagaaaggg

SEQ ID NO: 72706 - DNA, 20 bp, synthetic construct
  misc_feature 1..20: note = Description of Artificial Sequence: Synthetic oligonucleotide
  misc_feature 1..20: note = Target: SCN10A; (+) strand; PAM type: YTN; PAM sequence: TTG
  source 1..20: mol_type = other DNA
gtcaacagaaagggcccaat

SEQ ID NO: 72707 - DNA, 20 bp, synthetic construct
  misc_feature 1..20: note = Description of Artificial Sequence: Synthetic oligonucleotide
  misc_feature 1..20: note = Target: SCN10A; (+) strand; PAM type: YTN; PAM sequence: TTC
  source 1..20: mol_type = other DNA
ttctccacaacaaccgactg

SEQ ID NO: 72708 - DNA, 20 bp, synthetic construct
  misc_feature 1..20: note = Description of Artificial Sequence: Synthetic oligonucleotide
  misc_feature 1..20: note = Target: SCN10A; (+) strand; PAM type: YTN; PAM sequence: CTT
  source 1..20: mol_type = other DNA
ctccacaacaaccgactgca

SEQ ID NO: 72709 - DNA, 20 bp, synthetic construct
  misc_feature 1..20: note = Description of Artificial Sequence: Synthetic oligonucleotide
  misc_feature 1..20: note = Target: SCN10A; (+) strand; PAM type: YTN; PAM sequence: TTC
  source 1..20: mol_type = other DNA
tccacaacaaccgactgcat

SEQ ID NO: 72710 - DNA, 20 bp, synthetic construct
  misc_feature 1..20: note = Description of Artificial Sequence: Synthetic oligonucleotide
  misc_feature 1..20: note = Target: SCN10A; (+) strand; PAM type: YTN; PAM sequence: CTC
  source 1..20: mol_type = other DNA
cacaacaaccgactgcatgt

SEQ ID NO: 72711 - DNA, 20 bp, synthetic construct
  misc_feature 1..20: note = Description of Artificial Sequence: Synthetic oligonucleotide
  misc_feature 1..20: note = Target: SCN10A; (+) strand; PAM type: YTN; PAM sequence: CTG
  source 1..20: mol_type = other DNA
catgtcacacaaccaacagt

SEQ ID NO: 72712 - DNA, 20 bp, synthetic construct
  misc_feature 1..20: note = Description of Artificial Sequence: Synthetic oligonucleotide
  misc_feature 1..20: note = Target: SCN10A; (+) strand; PAM type: YTN; PAM sequence: TTA
  source 1..20: mol_type = other DNA
cttcaaaagttgaatgaatt

SEQ ID NO: 72713 - DNA, 20 bp, synthetic construct
  misc_feature 1..20: note = Description of Artificial Sequence: Synthetic oligonucleotide
  misc_feature 1..20: note = Target: SCN10A; (+) strand; PAM type: YTN; PAM sequence: CTT
  source 1..20: mol_type = other DNA
caaaagttgaatgaattggg

SEQ ID NO: 72714 - DNA, 20 bp, synthetic construct
  misc_feature 1..20: note = Description of Artificial Sequence: Synthetic oligonucleotide
  misc_feature 1..20: note = Target: SCN10A; (+) strand; PAM type: YTN; PAM sequence: TTC
  source 1..20: mol_type = other DNA
aaaagttgaatgaattgggc

SEQ ID NO: 72715 - DNA, 20 bp, synthetic construct
  misc_feature 1..20: note = Description of Artificial Sequence: Synthetic oligonucleotide
  misc_feature 1..20: note = Target: SCN10A; (+) strand; PAM type: YTN; PAM sequence: TTG
  source 1..20: mol_type = other DNA
aatgaattgggctatgaagt

SEQ ID NO: 72716 - DNA, 20 bp, synthetic construct
  misc_feature 1..20: note = Description of Artificial Sequence: Synthetic oligonucleotide
  misc_feature 1..20: note = Target: SCN10A; (+) strand; PAM type: YTN; PAM sequence: TTG
  source 1..20: mol_type = other DNA
ggctatgaagttttgcctca

SEQ ID NO: 72717 - DNA, 20 bp, synthetic construct
  misc_feature 1..20: note = Description of Artificial Sequence: Synthetic oligonucleotide
  misc_feature 1..20: note = Target: SCN10A; (+) strand; PAM type: YTN; PAM sequence: CTA
  source 1..20: mol_type = other DNA
tgaagttttgcctcatccac

SEQ ID NO: 72718 - DNA, 20 bp, synthetic construct
  misc_feature 1..20: note = Description of Artificial Sequence: Synthetic oligonucleotide
  misc_feature 1..20: note = Target: SCN10A; (+) strand; PAM type: YTN; PAM sequence: TTT
  source 1..20: mol_type = other DNA
tgcctcatccaccatattca

SEQ ID NO: 72719 - DNA, 20 bp, synthetic construct
  misc_feature 1..20: note = Description of Artificial Sequence: Synthetic oligonucleotide
  misc_feature 1..20: note = Target: SCN10A; (+) strand; PAM type: YTN; PAM sequence: TTT
  source 1..20: mol_type = other DNA
gcctcatccaccatattcac

SEQ ID NO: 72720 - DNA, 20 bp, synthetic construct
  misc_feature 1..20: note = Description of Artificial Sequence: Synthetic oligonucleotide
  misc_feature 1..20: note = Target: SCN10A; (+) strand; PAM type: YTN; PAM sequence: TTG
  source 1..20: mol_type = other DNA
cctcatccaccatattcacc

SEQ ID NO: 72721 - DNA, 20 bp, synthetic construct
  misc_feature 1..20: note = Description of Artificial Sequence: Synthetic oligonucleotide
  misc_feature 1..20: note = Target: SCN10A; (+) strand; PAM type: YTN; PAM sequence: CTC
  source 1..20: mol_type = other DNA
atccaccatattcacctgac

SEQ ID NO: 72722 - DNA, 20 bp, synthetic construct
  misc_feature 1..20: note = Description of Artificial Sequence: Synthetic oligonucleotide
  misc_feature 1..20: note = Target: SCN10A; (+) strand; PAM type: YTN; PAM sequence: TTC
  source 1..20: mol_type = other DNA
acctgacctctcaccaacca

SEQ ID NO: 72723 - DNA, 20 bp, synthetic construct
  misc_feature 1..20: note = Description of Artificial Sequence: Synthetic oligonucleotide
  misc_feature 1..20: note = Target: SCN10A; (+) strand; PAM type: YTN; PAM sequence: CTG
  source 1..20: mol_type = other DNA
acctctcaccaaccaactac

SEQ ID NO: 72724 - DNA, 20 bp, synthetic construct
  misc_feature 1..20: note = Description of Artificial Sequence: Synthetic oligonucleotide
  misc_feature 1..20: note = Target: SCN10A; (+) strand; PAM type: YTN; PAM sequence: CTC
  source 1..20: mol_type = other DNA
tcaccaaccaactaccactt

SEQ ID NO: 72725 - DNA, 20 bp, synthetic construct
  misc_feature 1..20: note = Description of Artificial Sequence: Synthetic oligonucleotide
  misc_feature 1..20: note = Target: SCN10A; (+) strand; PAM type: YTN; PAM sequence: CTC
  source 1..20: mol_type = other DNA
accaaccaactaccacttct

SEQ ID NO: 72726 - DNA, 20 bp, synthetic construct
  misc_feature 1..20: note = Description of Artificial Sequence: Synthetic oligonucleotide
  misc_feature 1..20: note = Target: SCN10A; (+) strand; PAM type: YTN; PAM sequence: CTA
  source 1..20: mol_type = other DNA
ccacttcttcaagcatctga

SEQ ID NO: 72727 - DNA, 20 bp, synthetic construct
  misc_feature 1..20: note = Description of Artificial Sequence: Synthetic oligonucleotide
  misc_feature 1..20: note = Target: SCN10A; (+) strand; PAM type: YTN; PAM sequence: CTT
  source 1..20: mol_type = other DNA
cttcaagcatctgaacaact

SEQ ID NO: 72728 - DNA, 20 bp, synthetic construct
  misc_feature 1..20: note = Description of Artificial Sequence: Synthetic oligonucleotide
  misc_feature 1..20: note = Target: SCN10A; (+) strand; PAM type: YTN; PAM sequence: TTC
  source 1..20: mol_type = other DNA
ttcaagcatctgaacaactt

SEQ ID NO: 72729 - DNA, 20 bp, synthetic construct
  misc_feature 1..20: note = Description of Artificial Sequence: Synthetic oligonucleotide
  misc_feature 1..20: note = Target: SCN10A; (+) strand; PAM type: YTN; PAM sequence: CTT
  source 1..20: mol_type = other DNA
caagcatctgaacaactttt

SEQ ID NO: 72730 - DNA, 20 bp, synthetic construct
  misc_feature 1..20: note = Description of Artificial Sequence: Synthetic oligonucleotide
  misc_feature 1..20: note = Target: SCN10A; (+) strand; PAM type: YTN; PAM sequence: TTC
  source 1..20: mol_type = other DNA
aagcatctgaacaacttttt

SEQ ID NO: 72731 - DNA, 20 bp, synthetic construct
  misc_feature 1..20: note = Description of Artificial Sequence: Synthetic oligonucleotide
  misc_feature 1..20: note = Target: SCN10A; (+) strand; PAM type: YTN; PAM sequence: CTG
  source 1..20: mol_type = other DNA
aacaactttttgcaggtgaa

SEQ ID NO: 72732 - DNA, 20 bp, synthetic construct
  misc_feature 1..20: note = Description of Artificial Sequence: Synthetic oligonucleotide
  misc_feature 1..20: note = Target: SCN10A; (+) strand; PAM type: YTN; PAM sequence: CTT
  source 1..20: mol_type = other DNA
tttgcaggtgaaacacttcc

SEQ ID NO: 72733 - DNA, 20 bp, synthetic construct
  misc_feature 1..20: note = Description of Artificial Sequence: Synthetic oligonucleotide
  misc_feature 1..20: note = Target: SCN10A; (+) strand; PAM type: YTN; PAM sequence: TTT
  source 1..20: mol_type = other DNA
ttgcaggtgaaacacttcca

SEQ ID NO: 72734 - DNA, 20 bp, synthetic construct
  misc_feature 1..20: note = Description of Artificial Sequence: Synthetic oligonucleotide
  misc_feature 1..20: note = Target: SCN10A; (+) strand; PAM type: YTN; PAM sequence: TTT
  source 1..20: mol_type = other DNA
tgcaggtgaaacacttccat

SEQ ID NO: 72735 - DNA, 20 bp, synthetic construct
  misc_feature 1..20: note = Description of Artificial Sequence: Synthetic oligonucleotide
  misc_feature 1..20: note = Target: SCN10A; (+) strand; PAM type: YTN; PAM sequence: TTT
  source 1..20: mol_type = other DNA
gcaggtgaaacacttccata

SEQ ID NO: 72736 - DNA, 20 bp, synthetic construct
  misc_feature 1..20: note = Description of Artificial Sequence: Synthetic oligonucleotide
  misc_feature 1..20: note = Target: SCN10A; (+) strand; PAM type: YTN; PAM sequence: TTG
  source 1..20: mol_type = other DNA
caggtgaaacacttccataa

SEQ ID NO: 72737 - DNA, 20 bp, synthetic construct
  misc_feature 1..20: note = Description of Artificial Sequence: Synthetic oligonucleotide
  misc_feature 1..20: note = Target: SCN10A; (+) strand; PAM type: YTN; PAM sequence: CTT
  source 1..20: mol_type = other DNA
ccataaccagcgggatgcag

SEQ ID NO: 72738 - DNA, 20 bp, synthetic construct
  misc_feature 1..20: note = Description of Artificial Sequence: Synthetic oligonucleotide
  misc_feature 1..20: note = Target: SCN10A; (+) strand; PAM type: YTN; PAM sequence: TTC
  source 1..20: mol_type = other DNA
cataaccagcgggatgcaga

SEQ ID NO: 72739 - DNA, 20 bp, synthetic construct
  misc_feature 1..20: note = Description of Artificial Sequence: Synthetic oligonucleotide
  misc_feature 1..20: note = Target: SCN10A; (+) strand; PAM type: YTN; PAM sequence: CTT
  source 1..20: mol_type = other DNA
ccaagagttcattgaatccc

SEQ ID NO: 72740 - DNA, 20 bp, synthetic construct
  misc_feature 1..20: note = Description of Artificial Sequence: Synthetic oligonucleotide
  misc_feature 1..20: note = Target: SCN10A; (+) strand; PAM type: YTN; PAM sequence: TTC
  source 1..20: mol_type = other DNA
caagagttcattgaatccca

SEQ ID NO: 72741 - DNA, 20 bp, synthetic construct
  misc_feature 1..20: note = Description of Artificial Sequence: Synthetic oligonucleotide
  misc_feature 1..20: note = Target: SCN10A; (+) strand; PAM type: YTN; PAM sequence: TTC
  source 1..20: mol_type = other DNA
attgaatcccaaagcatgga

SEQ ID NO: 72742 - DNA, 20 bp, synthetic construct
  misc_feature 1..20: note = Description of Artificial Sequence: Synthetic oligonucleotide
  misc_feature 1..20: note = Target: SCN10A; (+) strand; PAM type: YTN; PAM sequence: TTG
  source 1..20: mol_type = other DNA
aatcccaaagcatggatttt

SEQ ID NO: 72743 - DNA, 20 bp, synthetic construct
  misc_feature 1..20: note = Description of Artificial Sequence: Synthetic oligonucleotide
  misc_feature 1..20: note = Target: SCN10A; (+) strand; PAM type: YTN; PAM sequence: TTT
  source 1..20: mol_type = other DNA
ttatgctacaggaataaaca

SEQ ID NO: 72744 - DNA, 20 bp, synthetic construct
  misc_feature 1..20: note = Description of Artificial Sequence: Synthetic oligonucleotide
  misc_feature 1..20: note = Target: SCN10A; (+) strand; PAM type: YTN; PAM sequence: TTT
  source 1..20: mol_type = other DNA
tatgctacaggaataaacaa

SEQ ID NO: 72745 - DNA, 20 bp, synthetic construct
  misc_feature 1..20: note = Description of Artificial Sequence: Synthetic oligonucleotide
  misc_feature 1..20: note = Target: SCN10A; (+) strand; PAM type: YTN; PAM sequence: TTT
  source 1..20: mol_type = other DNA
atgctacaggaataaacaaa

SEQ ID NO: 72746 - DNA, 20 bp, synthetic construct
  misc_feature 1..20: note = Description of Artificial Sequence: Synthetic oligonucleotide
  misc_feature 1..20: note = Target: SCN10A; (+) strand; PAM type: YTN; PAM sequence: TTA
  source 1..20: mol_type = other DNA
tgctacaggaataaacaaac

SEQ ID NO: 72747 - DNA, 20 bp, synthetic construct
  misc_feature 1..20: note = Description of Artificial Sequence: Synthetic oligonucleotide
  misc_feature 1..20: note = Target: SCN10A; (+) strand; PAM type: YTN; PAM sequence: CTA
  source 1..20: mol_type = other DNA
caggaataaacaaactcatt

SEQ ID NO: 72748 - DNA, 20 bp, synthetic construct
  misc_feature 1..20: note = Description of Artificial Sequence: Synthetic oligonucleotide
  misc_feature 1..20: note = Target: SCN10A; (+) strand; PAM type: YTN; PAM sequence: CTC
  source 1..20: mol_type = other DNA
atttctcattggcaaaaatg

SEQ ID NO: 72749 - DNA, 20 bp, synthetic construct
  misc_feature 1..20: note = Description of Artificial Sequence: Synthetic oligonucleotide
  misc_feature 1..20: note = Target: SCN10A; (+) strand; PAM type: YTN; PAM sequence: TTT
  source 1..20: mol_type = other DNA
ctcattggcaaaaatgtgtt

SEQ ID NO: 72750 - DNA, 20 bp, synthetic construct
  misc_feature 1..20: note = Description of Artificial Sequence: Synthetic oligonucleotide
  misc_feature 1..20: note = Target: SCN10A; (+) strand; PAM type: YTN; PAM sequence: TTC
  source 1..20: mol_type = other DNA
tcattggcaaaaatgtgttg

SEQ ID NO: 72751 - DNA, 20 bp, synthetic construct
  misc_feature 1..20: note = Description of Artificial Sequence: Synthetic oligonucleotide
  misc_feature 1..20: note = Target: SCN10A; (+) strand; PAM type: YTN; PAM sequence: CTC
  source 1..20: mol_type = other DNA
attggcaaaaatgtgttgat

SEQ ID NO: 72752 - DNA, 20 bp, synthetic construct
  misc_feature 1..20: note = Description of Artificial Sequence: Synthetic oligonucleotide
  misc_feature 1..20: note = Target: SCN10A; (+) strand; PAM type: YTN; PAM sequence: TTG
  source 1..20: mol_type = other DNA
gcaaaaatgtgttgattgta

SEQ ID NO: 72753 - DNA, 20 bp, synthetic construct
  misc_feature 1..20: note = Description of Artificial Sequence: Synthetic oligonucleotide
  misc_feature 1..20: note = Target: SCN10A; (+) strand; PAM type: YTN; PAM sequence: TTG
  source 1..20: mol_type = other DNA
attgtaatggttcctacttt

SEQ ID NO: 72754 - DNA, 20 bp, synthetic construct
  misc_feature 1..20: note = Description of Artificial Sequence: Synthetic oligonucleotide
  misc_feature 1..20: note = Target: SCN10A; (+) strand; PAM type: YTN; PAM sequence: TTG
  source 1..20: mol_type = other DNA
taatggttcctactttgatt

SEQ ID NO: 72755 - DNA, 20 bp, synthetic construct
  misc_feature 1..20: note = Description of Artificial Sequence: Synthetic oligonucleotide
  misc_feature 1..20: note = Target: SCN10A; (+) strand; PAM type: YTN; PAM sequence: TTC
  source 1..20: mol_type = other DNA
ctactttgattaataaagat

SEQ ID NO: 72756 - DNA, 20 bp, synthetic construct
  misc_feature 1..20: note = Description of Artificial Sequence: Synthetic oligonucleotide
  misc_feature 1..20: note = Target: SCN10A; (+) strand; PAM type: YTN; PAM sequence: CTA
  source 1..20: mol_type = other DNA
ctttgattaataaagatgtg

SEQ ID NO: 72757 - DNA, 20 bp, synthetic construct
  misc_feature 1..20: note = Description of Artificial Sequence: Synthetic oligonucleotide
  misc_feature 1..20: note = Target: SCN10A; (+) strand; PAM type: YTN; PAM sequence: CTT
  source 1..20: mol_type = other DNA
tgattaataaagatgtgttt

SEQ ID NO: 72758 - DNA, 20 bp, synthetic construct
  misc_feature 1..20: note = Description of Artificial Sequence: Synthetic oligonucleotide
  misc_feature 1..20: note = Target: SCN10A; (+) strand; PAM type: YTN; PAM sequence: TTT
  source 1..20: mol_type = other DNA
gattaataaagatgtgtttg

SEQ ID NO: 72759 - DNA, 20 bp, synthetic construct
  misc_feature 1..20: note = Description of Artificial Sequence: Synthetic oligonucleotide
  misc_feature 1..20: note = Target: SCN10A; (+) strand; PAM type: YTN; PAM sequence: TTG
  source 1..20: mol_type = other DNA
attaataaagatgtgtttga

SEQ ID NO: 72760 - DNA, 20 bp, synthetic construct
  misc_feature 1..20: note = Description of Artificial Sequence: Synthetic oligonucleotide
  misc_feature 1..20: note = Target: SCN10A; (+) strand; PAM type: YTN; PAM sequence: TTA
  source 1..20: mol_type = other DNA
ataaagatgtgtttgagcct

SEQ ID NO: 72761 - DNA, 20 bp, synthetic construct
  misc_feature 1..20: note = Description of Artificial Sequence: Synthetic oligonucleotide
  misc_feature 1..20: note = Target: SCN10A; (+) strand; PAM type: YTN; PAM sequence: TTT
  source 1..20: mol_type = other DNA
gagcctagttataatgattt

SEQ ID NO: 72762 - DNA, 20 bp, synthetic construct
  misc_feature 1..20: note = Description of Artificial Sequence: Synthetic oligonucleotide
  misc_feature 1..20: note = Target: SCN10A; (+) strand; PAM type: YTN; PAM sequence: TTG
  source 1..20: mol_type = other DNA
agcctagttataatgattta

SEQ ID NO: 72763 - DNA, 20 bp, synthetic construct
  misc_feature 1..20: note = Description of Artificial Sequence: Synthetic oligonucleotide
  misc_feature 1..20: note = Target: SCN10A; (+) strand; PAM type: YTN; PAM sequence: CTA
  source 1..20: mol_type = other DNA
gttataatgatttaatattt

SEQ ID NO: 72764 - DNA, 20 bp, synthetic construct
  misc_feature 1..20: note = Description of Artificial Sequence: Synthetic oligonucleotide
  misc_feature 1..20: note = Target: SCN10A; (+) strand; PAM type: YTN; PAM sequence: TTA
  source 1..20: mol_type = other DNA
taatgatttaatatttatgg

SEQ ID NO: 72765 - DNA, 20 bp, synthetic construct
  misc_feature 1..20: note = Description of Artificial Sequence: Synthetic oligonucleotide
  misc_feature 1..20: note = Target: SCN10A; (+) strand; PAM type: YTN; PAM sequence: TTT
  source 1..20: mol_type = other DNA
aatatttatggtctgaaacc

SEQ ID NO: 72766 - DNA, 20 bp, synthetic construct
  misc_feature 1..20: note = Description of Artificial Sequence: Synthetic oligonucleotide
  misc_feature 1..20: note = Target: SCN10A; (+) strand; PAM type: YTN; PAM sequence: TTA
  source 1..20: mol_type = other DNA
atatttatggtctgaaaccc

SEQ ID NO: 72767 - DNA, 20 bp, synthetic construct
  misc_feature 1..20: note = Description of Artificial Sequence: Synthetic oligonucleotide
  misc_feature 1..20: note = Target: SCN10A; (+) strand; PAM type: YTN; PAM sequence: TTT
  source 1..20: mol_type = other DNA
atggtctgaaaccccaatta

SEQ ID NO: 72768 - DNA, 20 bp, synthetic construct
  misc_feature 1..20: note = Description of Artificial Sequence: Synthetic oligonucleotide
  misc_feature 1..20: note = Target: SCN10A; (+) strand; PAM type: YTN; PAM sequence: TTA
  source 1..20: mol_type = other DNA
tggtctgaaaccccaattac

SEQ ID NO: 72769 - DNA, 20 bp, synthetic construct
  misc_feature 1..20: note = Description of Artificial Sequence: Synthetic oligonucleotide
  misc_feature 1..20: note = Target: SCN10A; (+) strand; PAM type: YTN; PAM sequence: CTG
  source 1..20: mol_type = other DNA
aaaccccaattacttttgta

SEQ ID NO: 72770 - DNA, 20 bp, synthetic construct
  misc_feature 1..20: note = Description of Artificial Sequence: Synthetic oligonucleotide
  misc_feature 1..20: note = Target: SCN10A; (+) strand; PAM type: YTN; PAM sequence: TTA
  source 1..20: mol_type = other DNA
cttttgtaccttttcattat

SEQ ID NO: 72771 - DNA, 20 bp, synthetic construct
  misc_feature 1..20: note = Description of Artificial Sequence: Synthetic oligonucleotide
  misc_feature 1..20: note = Target: SCN10A; (+) strand; PAM type: YTN; PAM sequence: CTT
  source 1..20: mol_type = other DNA
ttgtaccttttcattatttg

SEQ ID NO: 72772 - DNA, 20 bp, synthetic construct
  misc_feature 1..20: note = Description of Artificial Sequence: Synthetic oligonucleotide
  misc_feature 1..20: note = Target: SCN10A; (+) strand; PAM type: YTN; PAM sequence: TTT
  source 1..20: mol_type = other DNA
tgtaccttttcattatttgg

SEQ ID NO: 72773 - DNA, 20 bp, synthetic construct
  misc_feature 1..20: note = Description of Artificial Sequence: Synthetic oligonucleotide
  misc_feature 1..20: note = Target: SCN10A; (+) strand; PAM type: YTN; PAM sequence: TTT
  source 1..20: mol_type = other DNA
gtaccttttcattatttggc

SEQ ID NO: 72774 - DNA, 20 bp, synthetic construct
  misc_feature 1..20: note = Description of Artificial Sequence: Synthetic oligonucleotide
  misc_feature 1..20: note = Target: SCN10A; (+) strand; PAM type: YTN; PAM sequence: TTG
  source 1..20: mol_type = other DNA
taccttttcattatttggca

SEQ ID NO: 72775 - DNA, 20 bp, synthetic construct
  misc_feature 1..20: note = Description of Artificial Sequence: Synthetic oligonucleotide
  misc_feature 1..20: note = Target: SCN10A; (+) strand; PAM type: YTN; PAM sequence: CTT
  source 1..20: mol_type = other DNA
ttcattatttggcatctctt

SEQ ID NO: 72776 - DNA, 20 bp, synthetic construct
  misc_feature 1..20: note = Description of Artificial Sequence: Synthetic oligonucleotide
  misc_feature 1..20: note = Target: SCN10A; (+) strand; PAM type: YTN; PAM sequence: TTT
  source 1..20: mol_type = other DNA
tcattatttggcatctctta

SEQ ID NO: 72777 - DNA, 20 bp, synthetic construct
  misc_feature 1..20: note = Description of Artificial Sequence: Synthetic oligonucleotide
  misc_feature 1..20: note = Target: SCN10A; (+) strand; PAM type: YTN; PAM sequence: TTT
  source 1..20: mol_type = other DNA
cattatttggcatctcttat

SEQ ID NO: 72778 - DNA, 20 bp, synthetic construct
  misc_feature 1..20: note = Description of Artificial Sequence: Synthetic oligonucleotide
  misc_feature 1..20: note = Target: SCN10A; (+) strand; PAM type: YTN; PAM sequence: TTC
  source 1..20: mol_type = other DNA
attatttggcatctcttatt

SEQ ID NO: 72779 - DNA, 20 bp, synthetic construct
  misc_feature 1..20: note = Description of Artificial Sequence: Synthetic oligonucleotide
  misc_feature 1..20: note = Target: SCN10A; (+) strand; PAM type: YTN; PAM sequence: TTA
  source 1..20: mol_type = other DNA
tttggcatctcttatttgct

SEQ ID NO: 72780 - DNA, 20 bp, synthetic construct
  misc_feature 1..20: note = Description of Artificial Sequence: Synthetic oligonucleotide
  misc_feature 1..20: note = Target: SCN10A; (+) strand; PAM type: YTN; PAM sequence: TTT
  source 1..20: mol_type = other DNA
ggcatctcttatttgctttt

SEQ ID NO: 72781 - DNA, 20 bp, synthetic construct
  misc_feature 1..20: note = Description of Artificial Sequence: Synthetic oligonucleotide
  misc_feature 1..20: note = Target: SCN10A; (+) strand; PAM type: YTN; PAM sequence: TTG
  source 1..20: mol_type = other DNA
gcatctcttatttgcttttt

SEQ ID NO: 72782 - DNA, 20 bp, synthetic construct
  misc_feature 1..20: note = Description of Artificial Sequence: Synthetic oligonucleotide
  misc_feature 1..20: note = Target: SCN10A; (+) strand; PAM type: YTN; PAM sequence: CTC
  source 1..20: mol_type = other DNA
ttatttgctttttatttttt

SEQ ID NO: 72783 - DNA, 20 bp, synthetic construct
  misc_feature 1..20: note = Description of Artificial Sequence: Synthetic oligonucleotide
  misc_feature 1..20: note = Target: SCN10A; (+) strand; PAM type: YTN; PAM sequence: CTT
  source 1..20: mol_type = other DNA
atttgctttttattttttga

SEQ ID NO: 72784 - DNA, 20 bp, synthetic construct
  misc_feature 1..20: note = Description of Artificial Sequence: Synthetic oligonucleotide
  misc_feature 1..20: note = Target: SCN10A; (+) strand; PAM type: YTN; PAM sequence: TTA
  source 1..20: mol_type = other DNA
tttgctttttattttttgat

SEQ ID NO: 72785 - DNA, 20 bp, synthetic construct
  misc_feature 1..20: note = Description of Artificial Sequence: Synthetic oligonucleotide
  misc_feature 1..20: note = Target: SCN10A; (+) strand; PAM type: YTN; PAM sequence: TTT
  source 1..20: mol_type = other DNA
gctttttattttttgatgta

SEQ ID NO: 72786 - DNA, 20 bp, synthetic construct
  misc_feature 1..20: note = Description of Artificial Sequence: Synthetic oligonucleotide
  misc_feature 1..20: note = Target: SCN10A; (+) strand; PAM type: YTN; PAM sequence: TTG
  source 1..20: mol_type = other DNA
ctttttattttttgatgtac

SEQ ID NO: 72787 - DNA, 20 bp, synthetic construct
  misc_feature 1..20: note = Description of Artificial Sequence: Synthetic oligonucleotide
  misc_feature 1..20: note = Target: SCN10A; (+) strand; PAM type: YTN; PAM sequence: CTT
  source 1..20: mol_type = other DNA
tttattttttgatgtacaat

SEQ ID NO: 72788 - DNA, 20 bp, synthetic construct
  misc_feature 1..20: note = Description of Artificial Sequence: Synthetic oligonucleotide
  misc_feature 1..20: note = Target: SCN10A; (+) strand; PAM type: YTN; PAM sequence: TTT
  source 1..20: mol_type = other DNA
ttattttttgatgtacaatt

SEQ ID NO: 72789 - DNA, 20 bp, synthetic construct
  misc_feature 1..20: note = Description of Artificial Sequence: Synthetic oligonucleotide
  misc_feature 1..20: note = Target: SCN10A; (+) strand; PAM type: YTN; PAM sequence: TTT
  source 1..20: mol_type = other DNA
tattttttgatgtacaattc

SEQ ID NO: 72790 - DNA, 20 bp, synthetic construct
  misc_feature 1..20: note = Description of Artificial Sequence: Synthetic oligonucleotide
  misc_feature 1..20: note = Target: SCN10A; (+) strand; PAM type: YTN; PAM sequence: TTT
  source 1..20: mol_type = other DNA
attttttgatgtacaattct

SEQ ID NO: 72791 - DNA, 20 bp, synthetic construct
  misc_feature 1..20: note = Description of Artificial Sequence: Synthetic oligonucleotide
  misc_feature 1..20: note = Target: SCN10A; (+) strand; PAM type: YTN; PAM sequence: TTA
  source 1..20: mol_type = other DNA
ttttttgatgtacaattctt

SEQ ID NO: 72792 - DNA, 20 bp, synthetic construct
  misc_feature 1..20: note = Description of Artificial Sequence: Synthetic oligonucleotide
  misc_feature 1..20: note = Target: SCN10A; (+) strand; PAM type: YTN; PAM sequence: TTT
  source 1..20: mol_type = other DNA
tttgatgtacaattcttcca

SEQ ID NO: 72793 - DNA, 20 bp, synthetic construct
  misc_feature 1..20: note = Description of Artificial Sequence: Synthetic oligonucleotide
  misc_feature 1..20: note = Target: SCN10A; (+) strand; PAM type: YTN; PAM sequence: TTT
  source 1..20: mol_type = other DNA
ttgatgtacaattcttccag

SEQ ID NO: 72794 - DNA, 20 bp, synthetic construct
  misc_feature 1..20: note = Description of Artificial Sequence: Synthetic oligonucleotide
  misc_feature 1..20: note = Target: SCN10A; (+) strand; PAM type: YTN; PAM sequence: TTT
  source 1..20: mol_type = other DNA
tgatgtacaattcttccagt

SEQ ID NO: 72795 - DNA, 20 bp, synthetic construct
  misc_feature 1..20: note = Description of Artificial Sequence: Synthetic oligonucleotide
  misc_feature 1..20: note = Target: SCN10A; (+) strand; PAM type: YTN; PAM sequence: TTT
  source 1..20: mol_type = other DNA
gatgtacaattcttccagta

SEQ ID NO: 72796 - DNA, 20 bp, synthetic construct
  misc_feature 1..20: note = Description of Artificial Sequence: Synthetic oligonucleotide
  misc_feature 1..20: note = Target: SCN10A; (+) strand; PAM type: YTN; PAM sequence: TTG
  source 1..20: mol_type = other DNA
atgtacaattcttccagtat

SEQ ID NO: 72797 - DNA, 20 bp, synthetic construct
  misc_feature 1..20: note = Description of Artificial Sequence: Synthetic oligonucleotide
  misc_feature 1..20: note = Target: SCN10A; (+) strand; PAM type: YTN; PAM sequence: TTC
  source 1..20: mol_type = other DNA
ttccagtatttagagtttgt

SEQ ID NO: 72798 - DNA, 20 bp, synthetic construct
  misc_feature 1..20: note = Description of Artificial Sequence: Synthetic oligonucleotide
  misc_feature 1..20: note = Target: SCN10A; (+) strand; PAM type: YTN; PAM sequence: CTT
  source 1..20: mol_type = other DNA
ccagtatttagagtttgtca

SEQ ID NO: 72799 - DNA, 20 bp, synthetic construct
  misc_feature 1..20: note = Description of Artificial Sequence: Synthetic oligonucleotide
  misc_feature 1..20: note = Target: SCN10A; (+) strand; PAM type: YTN; PAM sequence: TTC
  source 1..20: mol_type = other DNA
cagtatttagagtttgtcat

SEQ ID NO: 72800 - DNA, 20 bp, synthetic construct
  misc_feature 1..20: note = Description of Artificial Sequence: Synthetic oligonucleotide
  misc_feature 1..20: note = Target: SCN10A; (+) strand; PAM type: YTN; PAM sequence: TTT
  source 1..20: mol_type = other DNA
agagtttgtcatattatttg

SEQ ID NO: 72801 - DNA, 20 bp, synthetic construct
  misc_feature 1..20: note = Description of Artificial Sequence: Synthetic oligonucleotide
  misc_feature 1..20: note = Target: SCN10A; (+) strand; PAM type: YTN; PAM sequence: TTA
  source 1..20: mol_type = other DNA
gagtttgtcatattatttgt

SEQ ID NO: 72802 - DNA, 20 bp, synthetic construct
  misc_feature 1..20: note = Description of Artificial Sequence: Synthetic oligonucleotide
  misc_feature 1..20: note = Target: SCN10A; (+) strand; PAM type: YTN; PAM sequence: TTT
  source 1..20: mol_type = other DNA
gtcatattatttgttacaaa

SEQ ID NO: 72803 - DNA, 20 bp, synthetic construct
  misc_feature 1..20: note = Description of Artificial Sequence: Synthetic oligonucleotide
  misc_feature 1..20: note = Target: SCN10A; (+) strand; PAM type: YTN; PAM sequence: TTG
  source 1..20: mol_type = other DNA
tcatattatttgttacaaat

SEQ ID NO: 72804 - DNA, 20 bp, synthetic construct
  misc_feature 1..20: note = Description of Artificial Sequence: Synthetic oligonucleotide
  misc_feature 1..20: note = Target: SCN10A; (+) strand; PAM type: YTN; PAM sequence: TTA
  source 1..20: mol_type = other DNA
tttgttacaaatatatagat

SEQ ID NO: 72805 - DNA, 20 bp, synthetic construct
  misc_feature 1..20: note = Description of Artificial Sequence: Synthetic oligonucleotide
  misc_feature 1..20: note = Target: SCN10A; (+) strand; PAM type: YTN; PAM sequence: TTT
  source 1..20: mol_type = other DNA
gttacaaatatatagattac

SEQ ID NO: 72806 - DNA, 20 bp, synthetic construct
  misc_feature 1..20: note = Description of Artificial Sequence: Synthetic oligonucleotide
  misc_feature 1..20: note = Target: SCN10A; (+) strand; PAM type: YTN; PAM sequence: TTG
  source 1..20: mol_type = other DNA
ttacaaatatatagattact

SEQ ID NO: 72807 - DNA, 20 bp, synthetic construct
  misc_feature 1..20: note = Description of Artificial Sequence: Synthetic oligonucleotide
  misc_feature 1..20: note = Target: SCN10A; (+) strand; PAM type: YTN; PAM sequence: TTA
  source 1..20: mol_type = other DNA
caaatatatagattactaaa

SEQ ID NO: 72808 - DNA, 20 bp, synthetic construct
  misc_feature 1..20: note = Description of Artificial Sequence: Synthetic oligonucleotide
  misc_feature 1..20: note = Target: SCN10A; (+) strand; PAM type: YTN; PAM sequence: TTA
  source 1..20: mol_type = other DNA
ctaaagagtttgtatcttta

SEQ ID NO: 72809 - DNA, 20 bp, synthetic construct
  misc_feature 1..20: note = Description of Artificial Sequence: Synthetic oligonucleotide
  misc_feature 1..20: note = Target: SCN10A; (+) strand; PAM type: YTN; PAM sequence: CTA
  source 1..20: mol_type = other DNA
aagagtttgtatctttatcc

SEQ ID NO: 72810 - DNA, 20 bp, synthetic construct
  misc_feature 1..20: note = Description of Artificial Sequence: Synthetic oligonucleotide
  misc_feature 1..20: note = Target: SCN10A; (+) strand; PAM type: YTN; PAM sequence: TTT
  source 1..20: mol_type = other DNA
gtatctttatcctagtggtt

SEQ ID NO: 72811 - DNA, 20 bp, synthetic construct
  misc_feature 1..20: note = Description of Artificial Sequence: Synthetic oligonucleotide
  misc_feature 1..20: note = Target: SCN10A; (+) strand; PAM type: YTN; PAM sequence: TTG
  source 1..20: mol_type = other DNA
tatctttatcctagtggttg

SEQ ID NO: 72812 - DNA, 20 bp, synthetic construct
  misc_feature 1..20: note = Description of Artificial Sequence: Synthetic oligonucleotide
  misc_feature 1..20: note = Target: SCN10A; (+) strand; PAM type: YTN; PAM sequence: CTT
  source 1..20: mol_type = other DNA
tatcctagtggttgtcttta

SEQ ID NO: 72813 - DNA, 20 bp, synthetic construct
  misc_feature 1..20: note = Description of Artificial Sequence: Synthetic oligonucleotide
  misc_feature 1..20: note = Target: SCN10A; (+) strand; PAM type: YTN; PAM sequence: TTT
  source 1..20: mol_type = other DNA
atcctagtggttgtctttat

SEQ ID NO: 72814 - DNA, 20 bp, synthetic construct
  misc_feature 1..20: note = Description of Artificial Sequence: Synthetic oligonucleotide
  misc_feature 1..20: note = Target: SCN10A; (+) strand; PAM type: YTN; PAM sequence: TTA
  source 1..20: mol_type = other DNA
tcctagtggttgtctttata

SEQ ID NO: 72815 - DNA, 20 bp, synthetic construct
  misc_feature 1..20: note = Description of Artificial Sequence: Synthetic oligonucleotide
  misc_feature 1..20: note = Target: SCN10A; (+) strand; PAM type: YTN; PAM sequence: CTA
  source 1..20: mol_type = other DNA
gtggttgtctttataagtaa

SEQ ID NO: 72816 - DNA, 20 bp, synthetic construct
  misc_feature 1..20: note = Description of Artificial Sequence: Synthetic oligonucleotide
  misc_feature 1..20: note = Target: SCN10A; (+) strand; PAM type: YTN; PAM sequence: TTG
  source 1..20: mol_type = other DNA
tctttataagtaaaaactta

SEQ ID NO: 72817 - DNA, 20 bp, synthetic construct
  misc_feature 1..20: note = Description of Artificial Sequence: Synthetic oligonucleotide
  misc_feature 1..20: note = Target: SCN10A; (+) strand; PAM type: YTN; PAM sequence: CTT
  source 1..20: mol_type = other DNA
tataagtaaaaacttattat

SEQ ID NO: 72818 - DNA, 20 bp, synthetic construct
  misc_feature 1..20: note = Description of Artificial Sequence: Synthetic oligonucleotide
  misc_feature 1..20: note = Target: SCN10A; (+) strand; PAM type: YTN; PAM sequence: TTT
  source 1..20: mol_type = other DNA
ataagtaaaaacttattata

SEQ ID NO: 72819 - DNA, 20 bp, synthetic construct
  misc_feature 1..20: note = Description of Artificial Sequence: Synthetic oligonucleotide
  misc_feature 1..20: note = Target: SCN10A; (+) strand; PAM type: YTN; PAM sequence: TTA
  source 1..20: mol_type = other DNA
taagtaaaaacttattataa

SEQ ID NO: 72820 - DNA, 20 bp, synthetic construct
  misc_feature 1..20: note = Description of Artificial Sequence: Synthetic oligonucleotide
  misc_feature 1..20: note = Target: SCN10A; (+) strand; PAM type: YTN; PAM sequence: CTT
  source 1..20: mol_type = other DNA
attataaatttataattata

SEQ ID NO: 72821 - DNA, 20 bp, synthetic construct
  misc_feature 1..20: note = Description of Artificial Sequence: Synthetic oligonucleotide
  misc_feature 1..20: note = Target: SCN10A; (+) strand; PAM type: YTN; PAM sequence: TTA
  source 1..20: mol_type = other DNA
ttataaatttataattataa

SEQ ID NO: 72822 - DNA, 20 bp, synthetic construct
  misc_feature 1..20: note = Description of Artificial Sequence: Synthetic oligonucleotide
  misc_feature 1..20: note = Target: SCN10A; (+) strand; PAM type: YTN; PAM sequence: TTA
  source 1..20: mol_type = other DNA
taaatttataattataatta

SEQ ID NO: 72823 - DNA, 20 bp, synthetic construct
  misc_feature 1..20: note = Description of Artificial Sequence: Synthetic oligonucleotide
  misc_feature 1..20: note = Target: SCN10A; (+) strand; PAM type: YTN; PAM sequence: TTT
  source 1..20: mol_type = other DNA
ataattataattaaaaccgt

SEQ ID NO: 72824 - DNA, 20 bp, synthetic construct
  misc_feature 1..20: note = Description of Artificial Sequence: Synthetic oligonucleotide
  misc_feature 1..20: note = Target: SCN10A; (+) strand; PAM type: YTN; PAM sequence: TTA
  source 1..20: mol_type = other DNA
taattataattaaaaccgtg

SEQ ID NO: 72825 - DNA, 20 bp, synthetic construct
  misc_feature 1..20: note = Description of Artificial Sequence: Synthetic oligonucleotide
  misc_feature 1..20: note = Target: SCN10A; (+) strand; PAM type: YTN; PAM sequence: TTA
  source 1..20: mol_type = other DNA
taattaaaaccgtgtaatac

SEQ ID NO: 72826 - DNA, 20 bp, synthetic construct
  misc_feature 1..20: note = Description of Artificial Sequence: Synthetic oligonucleotide
  misc_feature 1..20: note = Target: SCN10A; (+) strand; PAM type: YTN; PAM sequence: TTA
  source 1..20: mol_type = other DNA
aaaccgtgtaatacattgtc

SEQ ID NO: 72827 - DNA, 20 bp, synthetic construct
  misc_feature 1..20: note = Description of Artificial Sequence: Synthetic oligonucleotide
  misc_feature 1..20: note = Target: SCN10A; (+) strand; PAM type: YTN; PAM sequence: TTG
  source 1..20: mol_type = other DNA
tccttagtgtactatttctt

SEQ ID NO: 72828 - DNA, 20 bp, synthetic construct
  misc_feature 1..20: note = Description of Artificial Sequence: Synthetic oligonucleotide
  misc_feature 1..20: note = Target: SCN10A; (+) strand; PAM type: YTN; PAM sequence: CTT
  source 1..20: mol_type = other DNA
agtgtactatttctttaatc

SEQ ID NO: 72829 - DNA, 20 bp, synthetic construct
  misc_feature 1..20: note = Description of Artificial Sequence: Synthetic oligonucleotide
  misc_feature 1..20: note = Target: SCN10A; (+) strand; PAM type: YTN; PAM sequence: TTA
  source 1..20: mol_type = other DNA
gtgtactatttctttaatca

SEQ ID NO: 72830 - DNA, 20 bp, synthetic construct
  misc_feature 1..20: note = Description of Artificial Sequence: Synthetic oligonucleotide
  misc_feature 1..20: note = Target: SCN10A; (+) strand; PAM type: YTN; PAM sequence: CTA
  source 1..20: mol_type = other DNA
tttctttaatcaaaatctct

SEQ ID NO: 72831 - DNA, 20 bp, synthetic construct
  misc_feature 1..20: note = Description of Artificial Sequence: Synthetic oligonucleotide
  misc_feature 1..20: note = Target: SCN10A; (+) strand; PAM type: YTN; PAM sequence: TTT
  source 1..20: mol_type = other DNA
ctttaatcaaaatctctcat

SEQ ID NO: 72832 - DNA, 20 bp, synthetic construct
  misc_feature 1..20: note = Description of Artificial Sequence: Synthetic oligonucleotide
  misc_feature 1..20: note = Target: SCN10A; (+) strand; PAM type: YTN; PAM sequence: TTC
  source 1..20: mol_type = other DNA
tttaatcaaaatctctcatt

SEQ ID NO: 72833 - DNA, 20 bp, synthetic construct
  misc_feature 1..20: note = Description of Artificial Sequence: Synthetic oligonucleotide
  misc_feature 1..20: note = Target: SCN10A; (+) strand; PAM type: YTN; PAM sequence: CTT
  source 1..20: mol_type = other DNA
taatcaaaatctctcatttc

SEQ ID NO: 72834 - DNA, 20 bp, synthetic construct
  misc_feature 1..20: note = Description of Artificial Sequence: Synthetic oligonucleotide
  misc_feature 1..20: note = Target: SCN10A; (+) strand; PAM type: YTN; PAM sequence: TTT
  source 1..20: mol_type = other DNA
aatcaaaatctctcatttcc

SEQ ID NO: 72835 - DNA, 20 bp, synthetic construct
  misc_feature 1..20: note = Description of Artificial Sequence: Synthetic oligonucleotide
  misc_feature 1..20: note = Target: SCN10A; (+) strand; PAM type: YTN; PAM sequence: TTA
  source 1..20: mol_type = other DNA
atcaaaatctctcatttcca

SEQ ID NO: 72836 - DNA, 20 bp, synthetic construct
  misc_feature 1..20: note = Description of Artificial Sequence: Synthetic oligonucleotide
  misc_feature 1..20: note = Target: SCN10A; (+) strand; PAM type: YTN; PAM sequence: CTC
  source 1..20: mol_type = other DNA
tcatttccatttggtgattc

SEQ ID NO: 72837 - DNA, 20 bp, synthetic construct
  misc_feature 1..20: note = Description of Artificial Sequence: Synthetic oligonucleotide
  misc_feature 1..20: note = Target: SCN10A; (+) strand; PAM type: YTN; PAM sequence: CTC
  source 1..20: mol_type = other DNA
atttccatttggtgattcct

SEQ ID NO: 72838 - DNA, 20 bp, synthetic construct
  misc_feature 1..20: note = Description of Artificial Sequence: Synthetic oligonucleotide
  misc_feature 1..20: note = Target: SCN10A; (+) strand; PAM type: YTN; PAM sequence: TTT
  source 1..20: mol_type = other DNA
ccatttggtgattcctttcc

SEQ ID NO: 72839 - DNA, 20 bp, synthetic construct
  misc_feature 1..20: note = Description of Artificial Sequence: Synthetic oligonucleotide
  misc_feature 1..20: note = Target: SCN10A; (+) strand; PAM type: YTN; PAM sequence: TTC
  source 1..20: mol_type = other DNA
catttggtgattcctttcct

SEQ ID NO: 72840 - DNA, 20 bp, synthetic construct
  misc_feature 1..20: note = Description of Artificial Sequence: Synthetic oligonucleotide
  misc_feature 1..20: note = Target: SCN10A; (+) strand; PAM type: YTN; PAM sequence: TTT
  source 1..20: mol_type = other DNA
ggtgattcctttcctctctg

SEQ ID NO: 72841 - DNA, 20 bp, synthetic construct
  misc_feature 1..20: note = Description of Artificial Sequence: Synthetic oligonucleotide
  misc_feature 1..20: note = Target: SCN10A; (+) strand; PAM type: YTN; PAM sequence: TTG
  source 1..20: mol_type = other DNA
gtgattcctttcctctctgt

SEQ ID NO: 72842 - DNA, 20 bp, synthetic construct
  misc_feature 1..20: note = Description of Artificial Sequence: Synthetic oligonucleotide
  misc_feature 1..20: note = Target: SCN10A; (+) strand; PAM type: YTN; PAM sequence: TTC
  source 1..20: mol_type = other DNA
ctttcctctctgttttatcc

SEQ ID NO: 72843 - DNA, 20 bp, synthetic construct
  misc_feature 1..20: note = Description of Artificial Sequence: Synthetic oligonucleotide
  misc_feature 1..20: note = Target: SCN10A; (+) strand; PAM type: YTN; PAM sequence: CTT
  source 1..20: mol_type = other DNA
tcctctctgttttatccatt

SEQ ID NO: 72844 - DNA, 20 bp, synthetic construct
  misc_feature 1..20: note = Description of Artificial Sequence: Synthetic oligonucleotide
  misc_feature 1..20: note = Target: SCN10A; (+) strand; PAM type: YTN; PAM sequence: TTT
  source 1..20: mol_type = other DNA
cctctctgttttatccatta

SEQ ID NO: 72845 - DNA, 20 bp, synthetic construct
  misc_feature 1..20: note = Description of Artificial Sequence: Synthetic oligonucleotide
  misc_feature 1..20: note = Target: SCN10A; (+) strand; PAM type: YTN; PAM sequence: TTC
  source 1..20: mol_type = other DNA
ctctctgttttatccattat

SEQ ID NO: 72846 - DNA, 20 bp, synthetic construct
  misc_feature 1..20: note = Description of Artificial Sequence: Synthetic oligonucleotide
  misc_feature 1..20: note = Target: SCN10A; (+) strand; PAM type: YTN; PAM sequence: CTC
  source 1..20: mol_type = other DNA
tctgttttatccattatctg

SEQ ID NO: 72847 - DNA, 20 bp, synthetic construct
  misc_feature 1..20: note = Description of Artificial Sequence: Synthetic oligonucleotide
  misc_feature 1..20: note = Target: SCN10A; (+) strand; PAM type: YTN; PAM sequence: CTC
  source 1..20: mol_type = other DNA
tgttttatccattatctgac

SEQ ID NO: 72848 - DNA, 20 bp, synthetic construct
  misc_feature 1..20: note = Description of Artificial Sequence: Synthetic oligonucleotide
  misc_feature 1..20: note = Target: SCN10A; (+) strand; PAM type: YTN; PAM sequence: CTG
  source 1..20: mol_type = other DNA
ttttatccattatctgactg

SEQ ID NO: 72849 - DNA, 20 bp, synthetic construct
  misc_feature 1..20: note = Description of Artificial Sequence: Synthetic oligonucleotide
  misc_feature 1..20: note = Target: SCN10A; (+) strand; PAM type: YTN; PAM sequence: TTT
  source 1..20: mol_type = other DNA
tatccattatctgactgtat

SEQ ID NO: 72850 - DNA, 20 bp, synthetic construct
  misc_feature 1..20: note = Description of Artificial Sequence: Synthetic oligonucleotide
  misc_feature 1..20: note = Target: SCN10A; (+) strand; PAM type: YTN; PAM sequence: TTT
  source 1..20: mol_type = other DNA
atccattatctgactgtatt

SEQ ID NO: 72851 - DNA, 20 bp, synthetic construct
  misc_feature 1..20: note = Description of Artificial Sequence: Synthetic oligonucleotide
  misc_feature 1..20: note = Target: SCN10A; (+) strand; PAM type: YTN; PAM sequence: TTA
  source 1..20: mol_type = other DNA
tccattatctgactgtattt

SEQ ID NO: 72852 - DNA, 20 bp, synthetic construct
  misc_feature 1..20: note = Description of Artificial Sequence: Synthetic oligonucleotide
  misc_feature 1..20: note = Target: SCN10A; (+) strand; PAM type: YTN; PAM sequence: TTA
  source 1..20: mol_type = other DNA
tctgactgtatttaataata

SEQ ID NO: 72853 - DNA, 20 bp, synthetic construct
  misc_feature 1..20: note = Description of Artificial Sequence: Synthetic oligonucleotide
  misc_feature 1..20: note = Target: SCN10A; (+) strand; PAM type: YTN; PAM sequence: CTG
  source 1..20: mol_type = other DNA
actgtatttaataatatctt

SEQ ID NO: 72854 - DNA, 20 bp, synthetic construct
  misc_feature 1..20: note = Description of Artificial Sequence: Synthetic oligonucleotide
  misc_feature 1..20: note = Target: SCN10A; (+) strand; PAM type: YTN; PAM sequence: CTG
  source 1..20: mol_type = other DNA
tatttaataatatctttttg

SEQ ID NO: 72855 - DNA, 20 bp, synthetic construct
  misc_feature 1..20: note = Description of Artificial Sequence: Synthetic oligonucleotide
  misc_feature 1..20: note = Target: SCN10A; (+) strand; PAM type: YTN; PAM sequence: TTT
  source 1..20: mol_type = other DNA
aataatatctttttgtgctt

SEQ ID NO: 72856 - DNA, 20 bp, synthetic construct
  misc_feature 1..20: note = Description of Artificial Sequence: Synthetic oligonucleotide
  misc_feature 1..20: note = Target: SCN10A; (+) strand; PAM type: YTN; PAM sequence: TTA
  source 1..20: mol_type = other DNA
ataatatctttttgtgctta

SEQ ID NO: 72857 - DNA, 20 bp, synthetic construct
  misc_feature 1..20: note = Description of Artificial Sequence: Synthetic oligonucleotide
  misc_feature 1..20: note = Target: SCN10A; (+) strand; PAM type: YTN; PAM sequence: CTT
  source 1..20: mol_type = other DNA
tttgtgcttacctttgtact

SEQ ID NO: 72858 - DNA, 20 bp, synthetic construct
  misc_feature 1..20: note = Description of Artificial Sequence: Synthetic oligonucleotide
  misc_feature 1..20: note = Target: SCN10A; (+) strand; PAM type: YTN; PAM sequence: TTT
  source 1..20: mol_type = other DNA
ttgtgcttacctttgtactg

SEQ ID NO: 72859 - DNA, 20 bp, synthetic construct
  misc_feature 1..20: note = Description of Artificial Sequence: Synthetic oligonucleotide
  misc_feature 1..20: note = Target: SCN10A; (+) strand; PAM type: YTN; PAM sequence: TTT
  source 1..20: mol_type = other DNA
tgtgcttacctttgtactgt

SEQ ID NO: 72860 - DNA, 20 bp, synthetic construct
  misc_feature 1..20: note = Description of Artificial Sequence: Synthetic oligonucleotide
  misc_feature 1..20: note = Target: SCN10A; (+) strand; PAM type: YTN; PAM sequence: TTT
  source 1..20: mol_type = other DNA
gtgcttacctttgtactgtc

SEQ ID NO: 72861 - DNA, 20 bp, synthetic construct
  misc_feature 1..20: note = Description of Artificial Sequence: Synthetic oligonucleotide
  misc_feature 1..20: note = Target: SCN10A; (+) strand; PAM type: YTN; PAM sequence: TTG
  source 1..20: mol_type = other DNA
tgcttacctttgtactgtca

SEQ ID NO: 72862 - DNA, 20 bp, synthetic construct
  misc_feature 1..20: note = Description of Artificial Sequence: Synthetic oligonucleotide
  misc_feature 1..20: note = Target: SCN10A; (+) strand; PAM type: YTN; PAM sequence: CTT
  source 1..20: mol_type = other DNA
acctttgtactgtcaagtgt

SEQ ID NO: 72863 - DNA, 20 bp, synthetic construct
  misc_feature 1..20: note = Description of Artificial Sequence: Synthetic oligonucleotide
  misc_feature 1..20: note = Target: SCN10A; (+) strand; PAM type: YTN; PAM sequence: TTA
  source 1..20: mol_type = other DNA
cctttgtactgtcaagtgta

SEQ ID NO: 72864 - DNA, 20 bp, synthetic construct
  misc_feature 1..20: note = Description of Artificial Sequence: Synthetic oligonucleotide
  misc_feature 1..20: note = Target: SCN10A; (+) strand; PAM type: YTN; PAM sequence: CTT
  source 1..20: mol_type = other DNA
tgtactgtcaagtgtaatta

SEQ ID NO: 72865 - DNA, 20 bp, synthetic construct
  misc_feature 1..20: note = Description of Artificial Sequence: Synthetic oligonucleotide
  misc_feature 1..20: note = Target: SCN10A; (+) strand; PAM type: YTN; PAM sequence: TTT
  source 1..20: mol_type = other DNA
gtactgtcaagtgtaattat

SEQ ID NO: 72866 - DNA, 20 bp, synthetic construct
  misc_feature 1..20: note = Description of Artificial Sequence: Synthetic oligonucleotide
  misc_feature 1..20: note = Target: SCN10A; (+) strand; PAM type: YTN; PAM sequence: TTG
  source 1..20: mol_type = other DNA
tactgtcaagtgtaattatt

SEQ ID NO: 72867 - DNA, 20 bp, synthetic construct
  misc_feature 1..20: note = Description of Artificial Sequence: Synthetic oligonucleotide
  misc_feature 1..20: note = Target: SCN10A; (+) strand; PAM type: YTN; PAM sequence: CTG
  source 1..20: mol_type = other DNA
tcaagtgtaattattttgtc

SEQ ID NO: 72868 - DNA, 20 bp, synthetic construct
  misc_feature 1..20: note = Description of Artificial Sequence: Synthetic oligonucleotide
  misc_feature 1..20: note = Target: SCN10A; (+) strand; PAM type: YTN; PAM sequence: TTA
  source 1..20: mol_type = other DNA
ttttgtccatttctttattt

SEQ ID NO: 72869 - DNA, 20 bp, synthetic construct
  misc_feature 1..20: note = Description of Artificial Sequence: Synthetic oligonucleotide
  misc_feature 1..20: note = Target: SCN10A; (+) strand; PAM type: YTN; PAM sequence: TTT
  source 1..20: mol_type = other DNA
tgtccatttctttatttgtc

SEQ ID NO: 72870 - DNA, 20 bp, synthetic construct
  misc_feature 1..20: note = Description of Artificial Sequence: Synthetic oligonucleotide
  misc_feature 1..20: note = Target: SCN10A; (+) strand; PAM type: YTN; PAM sequence: TTT
  source 1..20: mol_type = other DNA
gtccatttctttatttgtca

SEQ ID NO: 72871 - DNA, 20 bp, synthetic construct
  misc_feature 1..20: note = Description of Artificial Sequence: Synthetic oligonucleotide
  misc_feature 1..20: note = Target: SCN10A; (+) strand; PAM type: YTN; PAM sequence: TTG
  source 1..20: mol_type = other DNA
tccatttctttatttgtcaa

SEQ ID NO: 72872 - DNA, 20 bp, synthetic construct
  misc_feature 1..20: note = Description of Artificial Sequence: Synthetic oligonucleotide
  misc_feature 1..20: note = Target: SCN10A; (+) strand; PAM type: YTN; PAM sequence: TTT
  source 1..20: mol_type = other DNA
ctttatttgtcaactttaaa

SEQ ID NO: 72873 - DNA, 20 bp, synthetic construct
  misc_feature 1..20: note = Description of Artificial Sequence: Synthetic oligonucleotide
  misc_feature 1..20: note = Target: SCN10A; (+) strand; PAM type: YTN; PAM sequence: TTC
  source 1..20: mol_type = other DNA
tttatttgtcaactttaaat

SEQ ID NO: 72874 - DNA, 20 bp, synthetic construct
  misc_feature 1..20: note = Description of Artificial Sequence: Synthetic oligonucleotide
  misc_feature 1..20: note = Target: SCN10A; (+) strand; PAM type: YTN; PAM sequence: CTT
  source 1..20: mol_type = other DNA
tatttgtcaactttaaataa

SEQ ID NO: 72875 - DNA, 20 bp, synthetic construct
  misc_feature 1..20: note = Description of Artificial Sequence: Synthetic oligonucleotide
  misc_feature 1..20: note = Target: SCN10A; (+) strand; PAM type: YTN; PAM sequence: TTT
  source 1..20: mol_type = other DNA
atttgtcaactttaaataat

SEQ ID NO: 72876 - DNA, 20 bp, synthetic construct
  misc_feature 1..20: note = Description of Artificial Sequence: Synthetic oligonucleotide
  misc_feature 1..20: note = Target: SCN10A; (+) strand; PAM type: YTN; PAM sequence: TTA
  source 1..20: mol_type = other DNA
tttgtcaactttaaataata

SEQ ID NO: 72877 - DNA, 20 bp, synthetic construct
  misc_feature 1..20: note = Description of Artificial Sequence: Synthetic oligonucleotide
  misc_feature 1..20: note = Target: SCN10A; (+) strand; PAM type: YTN; PAM sequence: TTT
  source 1..20: mol_type = other DNA
gtcaactttaaataatactc

SEQ ID NO: 72878 - DNA, 20 bp, synthetic construct
  misc_feature 1..20: note = Description of Artificial Sequence: Synthetic oligonucleotide
  misc_feature 1..20: note = Target: SCN10A; (+) strand; PAM type: YTN; PAM sequence: TTG
  source 1..20: mol_type = other DNA
tcaactttaaataatactct

SEQ ID NO: 72879 - DNA, 20 bp, synthetic construct
  misc_feature 1..20: note = Description of Artificial Sequence: Synthetic oligonucleotide
  misc_feature 1..20: note = Target: SCN10A; (+) strand; PAM type: YTN; PAM sequence: CTT
  source 1..20: mol_type = other DNA
taaataatactctttaactt

SEQ ID NO: 72880 - DNA, 20 bp, synthetic construct
  misc_feature 1..20: note = Description of Artificial Sequence: Synthetic oligonucleotide
  misc_feature 1..20: note = Target: SCN10A; (+) strand; PAM type: YTN; PAM sequence: TTT
  source 1..20: mol_type = other DNA
aaataatactctttaacttc

SEQ ID NO: 72881 - DNA, 20 bp, synthetic construct
  misc_feature 1..20: note = Description of Artificial Sequence: Synthetic oligonucleotide
  misc_feature 1..20: note = Target: SCN10A; (+) strand; PAM type: YTN; PAM sequence: TTA
  source 1..20: mol_type = other DNA
aataatactctttaacttct

SEQ ID NO: 72882 - DNA, 20 bp, synthetic construct
  misc_feature 1..20: note = Description of Artificial Sequence: Synthetic oligonucleotide
  misc_feature 1..20: note = Target: SCN10A; (+) strand; PAM type: YTN; PAM sequence: CTC
  source 1..20: mol_type = other DNA
tttaacttcttgttattata

SEQ ID NO: 72883 - DNA, 20 bp, synthetic construct
  misc_feature 1..20: note = Description of Artificial Sequence: Synthetic oligonucleotide
  misc_feature 1..20: note = Target: SCN10A; (+) strand; PAM type: YTN; PAM sequence: CTT
  source 1..20: mol_type = other DNA
taacttcttgttattataga

SEQ ID NO: 72884 - DNA, 20 bp, synthetic construct
  misc_feature 1..20: note = Description of Artificial Sequence: Synthetic oligonucleotide
  misc_feature 1..20: note = Target: SCN10A; (+) strand; PAM type: YTN; PAM sequence: TTT
  source 1..20: mol_type = other DNA
aacttcttgttattatagaa

SEQ ID NO: 72885 - DNA, 20 bp, synthetic construct
  misc_feature 1..20: note = Description of Artificial Sequence: Synthetic oligonucleotide
  misc_feature 1..20: note = Target: SCN10A; (+) strand; PAM type: YTN; PAM sequence: TTA
  source 1..20: mol_type = other DNA
acttcttgttattatagaag

SEQ ID NO: 72886 - DNA, 20 bp, synthetic construct
  misc_feature 1..20: note = Description of Artificial Sequence: Synthetic oligonucleotide
  misc_feature 1..20: note = Target: SCN10A; (+) strand; PAM type: YTN; PAM sequence: CTT
  source 1..20: mol_type = other DNA
cttgttattatagaagcagc

SEQ ID NO: 72887 - DNA, 20 bp, synthetic construct
  misc_feature 1..20: note = Description of Artificial Sequence: Synthetic oligonucleotide
  misc_feature 1..20: note = Target: SCN10A; (+) strand; PAM type: YTN; PAM sequence: TTC
  source 1..20: mol_type = other DNA
ttgttattatagaagcagca

SEQ ID NO: 72888 - DNA, 20 bp, synthetic construct
  misc_feature 1..20: note = Description of Artificial Sequence: Synthetic oligonucleotide
  misc_feature 1..20: note = Target: SCN10A; (+) strand; PAM type: YTN; PAM sequence: CTT
  source 1..20: mol_type = other DNA
gttattatagaagcagcagt

SEQ ID NO: 72889 - DNA, 20 bp, synthetic construct
  misc_feature 1..20: note = Description of Artificial Sequence: Synthetic oligonucleotide
  misc_feature 1..20: note = Target: SCN10A; (+) strand; PAM type: YTN; PAM sequence: TTG
  source 1..20: mol_type = other DNA
ttattatagaagcagcagta

SEQ ID NO: 72890 - DNA, 20 bp, synthetic construct
  misc_feature 1..20: note = Description of Artificial Sequence: Synthetic oligonucleotide
  misc_feature 1..20: note = Target: SCN10A; (+) strand; PAM type: YTN; PAM sequence: TTA
  source 1..20: mol_type = other DNA
ttatagaagcagcagtaagt

SEQ ID NO: 72891 - DNA, 20 bp, synthetic construct
  misc_feature 1..20: note = Description of Artificial Sequence: Synthetic oligonucleotide
  misc_feature 1..20: note = Target: SCN10A; (+) strand; PAM type: YTN; PAM sequence: TTA
  source 1..20: mol_type = other DNA
tagaagcagcagtaagtgaa

SEQ ID NO: 72892 - DNA, 20 bp, synthetic construct
  misc_feature 1..20: note = Description of Artificial Sequence: Synthetic oligonucleotide
  misc_feature 1..20: note = Target: SCN10A; (+) strand; PAM type: YTN; PAM sequence: CTC
  source 1..20: mol_type = other DNA
tgctcacatgttctttcctc

SEQ ID NO: 72893 - DNA, 20 bp, synthetic construct
  misc_feature 1..20: note = Description of Artificial Sequence: Synthetic oligonucleotide
  misc_feature 1..20: note = Target: SCN10A; (+) strand; PAM type: YTN; PAM sequence: CTG
  source 1..20: mol_type = other DNA
ctcacatgttctttcctctt

SEQ ID NO: 72894 - DNA, 20 bp, synthetic construct
  misc_feature 1..20: note = Description of Artificial Sequence: Synthetic oligonucleotide
  misc_feature 1..20: note = Target: SCN10A; (+) strand; PAM type: YTN; PAM sequence: CTC
  source 1..20: mol_type = other DNA
acatgttctttcctctttct

SEQ ID NO: 72895 - DNA, 20 bp, synthetic construct
  misc_feature 1..20: note = Description of Artificial Sequence: Synthetic oligonucleotide
  misc_feature 1..20: note = Target: SCN10A; (+) strand; PAM type: YTN; PAM sequence: TTC
  source 1..20: mol_type = other DNA
tttcctctttctgcttccat

SEQ ID NO: 72896 - DNA, 20 bp, synthetic construct
  misc_feature 1..20: note = Description of Artificial Sequence: Synthetic oligonucleotide
  misc_feature 1..20: note = Target: SCN10A; (+) strand; PAM type: YTN; PAM sequence: CTT
  source 1..20: mol_type = other DNA
tcctctttctgcttccattt

SEQ ID NO: 72897 - DNA, 20 bp, synthetic construct
  misc_feature 1..20: note = Description of Artificial Sequence: Synthetic oligonucleotide
  misc_feature 1..20: note = Target: SCN10A; (+) strand; PAM type: YTN; PAM sequence: TTT
  source 1..20: mol_type = other DNA
cctctttctgcttccatttc

SEQ ID NO: 72898 - DNA, 20 bp, synthetic construct
  misc_feature 1..20: note = Description of Artificial Sequence: Synthetic oligonucleotide
  misc_feature 1..20: note = Target: SCN10A; (+) strand; PAM type: YTN; PAM sequence: TTC
  source 1..20: mol_type = other DNA
ctctttctgcttccatttct

SEQ ID NO: 72899 - DNA, 20 bp, synthetic construct
  misc_feature 1..20: note = Description of Artificial Sequence: Synthetic oligonucleotide
  misc_feature 1..20: note = Target: SCN10A; (+) strand; PAM type: YTN; PAM sequence: CTC
  source 1..20: mol_type = other DNA
tttctgcttccatttcttgc

SEQ ID NO: 72900 - DNA, 20 bp, synthetic construct
  misc_feature 1..20: note = Description of Artificial Sequence: Synthetic oligonucleotide
  misc_feature 1..20: note = Target: SCN10A; (+) strand; PAM type: YTN; PAM sequence: CTT
  source 1..20: mol_type = other DNA
tctgcttccatttcttgcta

SEQ ID NO: 72901 - DNA, 20 bp, synthetic construct
  misc_feature 1..20: note = Description of Artificial Sequence: Synthetic oligonucleotide
  misc_feature 1..20: note = Target: SCN10A; (+) strand; PAM type: YTN; PAM sequence: TTT
  source 1..20: mol_type = other DNA
ctgcttccatttcttgctat

SEQ ID NO: 72902 - DNA, 20 bp, synthetic construct
  misc_feature 1..20: note = Description of Artificial Sequence: Synthetic oligonucleotide
  misc_feature 1..20: note = Target: SCN10A; (+) strand; PAM type: YTN; PAM sequence: TTC
  source 1..20: mol_type = other DNA
tgcttccatttcttgctatt

SEQ ID NO: 72903 - DNA, 20 bp, synthetic construct
  misc_feature 1..20: note = Description of Artificial Sequence: Synthetic oligonucleotide
  misc_feature 1..20: note = Target: SCN10A; (+) strand; PAM type: YTN; PAM sequence: CTG
  source 1..20: mol_type = other DNA
cttccatttcttgctatttg

SEQ ID NO: 72904 - DNA, 20 bp, synthetic construct
  misc_feature 1..20: note = Description of Artificial Sequence: Synthetic oligonucleotide
  misc_feature 1..20: note = Target: SCN10A; (+) strand; PAM type: YTN; PAM sequence: CTT
  source 1..20: mol_type = other DNA
ccatttcttgctatttgtat

SEQ ID NO: 72905 - DNA, 20 bp, synthetic construct
  misc_feature 1..20: note = Description of Artificial Sequence: Synthetic oligonucleotide
  misc_feature 1..20: note = Target: SCN10A; (+) strand; PAM type: YTN; PAM sequence: TTC
  source 1..20: mol_type = other DNA
catttcttgctatttgtatc

SEQ ID NO: 72906 - DNA, 20 bp, synthetic construct
  misc_feature 1..20: note = Description of Artificial Sequence: Synthetic oligonucleotide
  misc_feature 1..20: note = Target: SCN10A; (+) strand; PAM type: YTN; PAM sequence: TTT
  source 1..20: mol_type = other DNA
cttgctatttgtatcatgtc

SEQ ID NO: 72907 - DNA, 20 bp, synthetic construct
  misc_feature 1..20: note = Description of Artificial Sequence: Synthetic oligonucleotide
  misc_feature 1..20: note = Target: SCN10A; (+) strand; PAM type: YTN; PAM sequence: TTC
  source 1..20: mol_type = other DNA
ttgctatttgtatcatgtca

SEQ ID NO: 72908 - DNA, 20 bp, synthetic construct
  misc_feature 1..20: note = Description of Artificial Sequence: Synthetic oligonucleotide
  misc_feature 1..20: note = Target: SCN10A; (+) strand; PAM type: YTN; PAM sequence: CTT
  source 1..20: mol_type = other DNA
gctatttgtatcatgtcaac

SEQ ID NO: 72909 - DNA, 20 bp, synthetic construct
  misc_feature 1..20: note = Description of Artificial Sequence: Synthetic oligonucleotide
  misc_feature 1..20: note = Target: SCN10A; (+) strand; PAM type: YTN; PAM sequence: TTG
  source 1..20: mol_type = other DNA
ctatttgtatcatgtcaaca

SEQ ID NO: 72910 - DNA, 20 bp, synthetic construct
  misc_feature 1..20: note = Description of Artificial Sequence: Synthetic oligonucleotide
  misc_feature 1..20: note = Target: SCN10A; (+) strand; PAM type: YTN; PAM sequence: CTA
  source 1..20: mol_type = other DNA
tttgtatcatgtcaacactt

SEQ ID NO: 72911 - DNA, 20 bp, synthetic construct
  misc_feature 1..20: note = Description of Artificial Sequence: Synthetic oligonucleotide
  misc_feature 1..20: note = Target: SCN10A; (+) strand; PAM type: YTN; PAM sequence: TTT
  source 1..20: mol_type = other DNA
gtatcatgtcaacacttgca

SEQ ID NO: 72912 - DNA, 20 bp, synthetic construct
  misc_feature 1..20: note = Description of Artificial Sequence: Synthetic oligonucleotide
  misc_feature 1..20: note = Target: SCN10A; (+) strand; PAM type: YTN; PAM sequence: TTG
  source 1..20: mol_type = other DNA
tatcatgtcaacacttgcag

SEQ ID NO: 72913 - DNA, 20 bp, synthetic construct
  misc_feature 1..20: note = Description of Artificial Sequence: Synthetic oligonucleotide
  misc_feature 1..20: note = Target: SCN10A; (+) strand; PAM type: YTN; PAM sequence: CTT
  source 1..20: mol_type = other DNA
gcagggcctctggggcttgt

SEQ ID NO: 72914 - DNA, 20 bp, synthetic construct
  misc_feature 1..20: note = Description of Artificial Sequence: Synthetic oligonucleotide
  misc_feature 1..20: note = Target: SCN10A; (+) strand; PAM type: YTN; PAM sequence: TTG
  source 1..20: mol_type = other DNA
cagggcctctggggcttgtt

SEQ ID NO: 72915 - DNA, 20 bp, synthetic construct
  misc_feature 1..20: note = Description of Artificial Sequence: Synthetic oligonucleotide
  misc_feature 1..20: note = Target: SCN10A; (+) strand; PAM type: YTN; PAM sequence: CTC
  source 1..20: mol_type = other DNA
tggggcttgttgggcagcgg

SEQ ID NO: 72916 - DNA, 20 bp, synthetic construct
  misc_feature 1..20: note = Description of Artificial Sequence: Synthetic oligonucleotide
  misc_feature 1..20: note = Target: SCN10A; (+) strand; PAM type: YTN; PAM sequence: CTG
  source 1..20: mol_type = other DNA
gggcttgttgggcagcgggg

SEQ ID NO: 72917 - DNA, 20 bp, synthetic construct
  misc_feature 1..20: note = Description of Artificial Sequence: Synthetic oligonucleotide
  misc_feature 1..20: note = Target: SCN10A; (+) strand; PAM type: YTN; PAM sequence: CTT
  source 1..20: mol_type = other DNA
gttgggcagcgggggcggta

SEQ ID NO: 72918 - DNA, 20 bp, synthetic construct
  misc_feature 1..20: note = Description of Artificial Sequence: Synthetic oligonucleotide
  misc_feature 1..20: note = Target: SCN10A; (+) strand; PAM type: YTN; PAM sequence: TTG
  source 1..20: mol_type = other DNA
ttgggcagcgggggcggtaa

SEQ ID NO: 72919 - DNA, 20 bp, synthetic construct
  misc_feature 1..20: note = Description of Artificial Sequence: Synthetic oligonucleotide
  misc_feature 1..20: note = Target: SCN10A; (+) strand; PAM type: YTN; PAM sequence: TTG
  source 1..20: mol_type = other DNA
ggcagcgggggcggtaaaat

SEQ ID NO: 72920 - DNA, 20 bp, synthetic construct
  misc_feature 1..20: note = Description of Artificial Sequence: Synthetic oligonucleotide
  misc_feature 1..20: note = Target: SCN10A; (+) strand; PAM type: YTN; PAM sequence: CTT
  source 1..20: mol_type = other DNA
tattctcatttttatccccc

SEQ ID NO: 72921 - DNA, 20 bp, synthetic construct
  misc_feature 1..20: note = Description of Artificial Sequence: Synthetic oligonucleotide
  misc_feature 1..20: note = Target: SCN10A; (+) strand; PAM type: YTN; PAM sequence: TTT
  source 1..20: mol_type = other DNA
attctcatttttatccccct

SEQ ID NO: 72922 - DNA, 20 bp, synthetic construct
  misc_feature 1..20: note = Description of Artificial Sequence: Synthetic oligonucleotide
  misc_feature 1..20: note = Target: SCN10A; (+) strand; PAM type: YTN; PAM sequence: TTA
  source 1..20: mol_type = other DNA
ttctcatttttatccccctc

SEQ ID NO: 72923 - DNA, 20 bp, synthetic construct
  misc_feature 1..20: note = Description of Artificial Sequence: Synthetic oligonucleotide
  misc_feature 1..20: note = Target: SCN10A; (+) strand; PAM type: YTN; PAM sequence: TTC
  source 1..20: mol_type = other DNA
tcatttttatccccctctgg

SEQ ID NO: 72924 - DNA, 20 bp, synthetic construct
  misc_feature 1..20: note = Description of Artificial Sequence: Synthetic oligonucleotide
  misc_feature 1..20: note = Target: SCN10A; (+) strand; PAM type: YTN; PAM sequence: CTC
  source 1..20: mol_type = other DNA
atttttatccccctctggag

SEQ ID NO: 72925 - DNA, 20 bp, synthetic construct
  misc_feature 1..20: note = Description of Artificial Sequence: Synthetic oligonucleotide
  misc_feature 1..20: note = Target: SCN10A; (+) strand; PAM type: YTN; PAM sequence: TTT
  source 1..20: mol_type = other DNA
ttatccccctctggaggcac

SEQ ID NO: 72926 - DNA, 20 bp, synthetic construct
  misc_feature 1..20: note = Description of Artificial Sequence: Synthetic oligonucleotide
  misc_feature 1..20: note = Target: SCN10A; (+) strand; PAM type: YTN; PAM sequence: TTT
  source 1..20: mol_type = other DNA
tatccccctctggaggcacc

SEQ ID NO: 72927 - DNA, 20 bp, synthetic construct
  misc_feature 1..20: note = Description of Artificial Sequence: Synthetic oligonucleotide
  misc_feature 1..20: note = Target: SCN10A; (+) strand; PAM type: YTN; PAM sequence: TTT
  source 1..20: mol_type = other DNA
atccccctctggaggcaccg

SEQ ID NO: 72928 - DNA, 20 bp, synthetic construct
  misc_feature 1..20: note = Description of Artificial Sequence: Synthetic oligonucleotide
  misc_feature 1..20: note = Target: SCN10A; (+) strand; PAM type: YTN; PAM sequence: TTA
  source 1..20: mol_type = other DNA
tccccctctggaggcaccgt

SEQ ID NO: 72929 - DNA, 20 bp, synthetic construct
  misc_feature 1..20: note = Description of Artificial Sequence: Synthetic oligonucleotide
  misc_feature 1..20: note = Target: SCN10A; (+) strand; PAM type: YTN; PAM sequence: CTC
  source 1..20: mol_type = other DNA
tggaggcaccgtggtttaac

SEQ ID NO: 72930 - DNA, 20 bp, synthetic construct
  misc_feature 1..20: note = Description of Artificial Sequence: Synthetic oligonucleotide
  misc_feature 1..20: note = Target: SCN10A; (+) strand; PAM type: YTN; PAM sequence: CTG
  source 1..20: mol_type = other DNA
gaggcaccgtggtttaacaa

SEQ ID NO: 72931 - DNA, 20 bp, synthetic construct
  misc_feature 1..20: note = Description of Artificial Sequence: Synthetic oligonucleotide
  misc_feature 1..20: note = Target: SCN10A; (+) strand; PAM type: YTN; PAM sequence: TTT
  source 1..20: mol_type = other DNA
aacaaaccctgatctgctaa

SEQ ID NO: 72932 - DNA, 20 bp, synthetic construct
  misc_feature 1..20: note = Description of Artificial Sequence: Synthetic oligonucleotide
  misc_feature 1..20: note = Target: SCN10A; (+) strand; PAM type: YTN; PAM sequence: TTA
  source 1..20: mol_type = other DNA
acaaaccctgatctgctaag

SEQ ID NO: 72933 - DNA, 20 bp, synthetic construct
  misc_feature 1..20: note = Description of Artificial Sequence: Synthetic oligonucleotide
  misc_feature 1..20: note = Target: SCN10A; (+) strand; PAM type: YTN; PAM sequence: CTG
  source 1..20: mol_type = other DNA
atctgctaagtgatttacca

SEQ ID NO: 72934 - DNA, 20 bp, synthetic construct
  misc_feature 1..20: note = Description of Artificial Sequence: Synthetic oligonucleotide
  misc_feature 1..20: note = Target: SCN10A; (+) strand; PAM type: YTN; PAM sequence: CTG
  source 1..20: mol_type = other DNA
ctaagtgatttaccacttct

SEQ ID NO: 72935 - DNA, 20 bp, synthetic construct
  misc_feature 1..20: note = Description of Artificial Sequence: Synthetic oligonucleotide
  misc_feature 1..20: note = Target: SCN10A; (+) strand; PAM type: YTN; PAM sequence: CTA
  source 1..20: mol_type = other DNA
agtgatttaccacttctcca

SEQ ID NO: 72936 - DNA, 20 bp, synthetic construct
  misc_feature 1..20: note = Description of Artificial Sequence: Synthetic oligonucleotide
  misc_feature 1..20: note = Target: SCN10A; (+) strand; PAM type: YTN; PAM sequence: TTT
  source 1..20: mol_type = other DNA
accacttctccacccacttt

SEQ ID NO: 72937 - DNA, 20 bp, synthetic construct
  misc_feature 1..20: note = Description of Artificial Sequence: Synthetic oligonucleotide
  misc_feature 1..20: note = Target: SCN10A; (+) strand; PAM type: YTN; PAM sequence: TTA
  source 1..20: mol_type = other DNA
ccacttctccacccactttt

SEQ ID NO: 72938 - DNA, 20 bp, synthetic construct
  misc_feature 1..20: note = Description of Artificial Sequence: Synthetic oligonucleotide
  misc_feature 1..20: note = Target: SCN10A; (+) strand; PAM type: YTN; PAM sequence: CTT
  source 1..20: mol_type = other DNA
ctccacccacttttggtctt

SEQ ID NO: 72939 - DNA, 20 bp, synthetic construct
  misc_feature 1..20: note = Description of Artificial Sequence: Synthetic oligonucleotide
  misc_feature 1..20: note = Target: SCN10A; (+) strand; PAM type: YTN; PAM sequence: TTC
  source 1..20: mol_type = other DNA
tccacccacttttggtcttc

SEQ ID NO: 72940 - DNA, 20 bp, synthetic construct
  misc_feature 1..20: note = Description of Artificial Sequence: Synthetic oligonucleotide
  misc_feature 1..20: note = Target: SCN10A; (+) strand; PAM type: YTN; PAM sequence: CTC
  source 1..20: mol_type = other DNA
cacccacttttggtcttcca

SEQ ID NO: 72941 - DNA, 20 bp, synthetic construct
  misc_feature 1..20: note = Description of Artificial Sequence: Synthetic oligonucleotide
  misc_feature 1..20: note = Target: SCN10A; (+) strand; PAM type: YTN; PAM sequence: CTT
  source 1..20: mol_type = other DNA
ttggtcttccaagtgttttg

SEQ ID NO: 72942 - DNA, 20 bp, synthetic construct
  misc_feature 1..20: note = Description of Artificial Sequence: Synthetic oligonucleotide
  misc_feature 1..20: note = Target: SCN10A; (+) strand; PAM type: YTN; PAM sequence: TTT
  source 1..20: mol_type = other DNA
tggtcttccaagtgttttga

SEQ ID NO: 72943 - DNA, 20 bp, synthetic construct
  misc_feature 1..20: note = Description of Artificial Sequence: Synthetic oligonucleotide
  misc_feature 1..20: note = Target: SCN10A; (+) strand; PAM type: YTN; PAM sequence: TTT
  source 1..20: mol_type = other DNA
ggtcttccaagtgttttgac

SEQ ID NO: 72944 - DNA, 20 bp, synthetic construct
  misc_feature 1..20: note = Description of Artificial Sequence: Synthetic oligonucleotide
  misc_feature 1..20: note = Target: SCN10A; (+) strand; PAM type: YTN; PAM sequence: TTG
  source 1..20: mol_type = other DNA
gtcttccaagtgttttgaca

SEQ ID NO: 72945 - DNA, 20 bp, synthetic construct
  misc_feature 1..20: note = Description of Artificial Sequence: Synthetic oligonucleotide
  misc_feature 1..20: note = Target: SCN10A; (+) strand; PAM type: YTN; PAM sequence: CTT
  source 1..20: mol_type = other DNA
ccaagtgttttgacatcatt

SEQ ID NO: 72946 - DNA, 20 bp, synthetic construct
  misc_feature 1..20: note = Description of Artificial Sequence: Synthetic oligonucleotide
  misc_feature 1..20: note = Target: SCN10A; (+) strand; PAM type: YTN; PAM sequence: TTC
  source 1..20: mol_type = other DNA
caagtgttttgacatcattt

SEQ ID NO: 72947 - DNA, 20 bp, synthetic construct
  misc_feature 1..20: note = Description of Artificial Sequence: Synthetic oligonucleotide
  misc_feature 1..20: note = Target: SCN10A; (+) strand; PAM type: YTN; PAM sequence: TTT
  source 1..20: mol_type = other DNA
tgacatcatttgtcctctgt

SEQ ID NO: 72948 - DNA, 20 bp, synthetic construct
  misc_feature 1..20: note = Description of Artificial Sequence: Synthetic oligonucleotide
  misc_feature 1..20: note = Target: SCN10A; (+) strand; PAM type: YTN; PAM sequence: TTT
  source 1..20: mol_type = other DNA
gacatcatttgtcctctgtg

SEQ ID NO: 72949 - DNA, 20 bp, synthetic construct
  misc_feature 1..20: note = Description of Artificial Sequence: Synthetic oligonucleotide
  misc_feature 1..20: note = Target: SCN10A; (+) strand; PAM type: YTN; PAM sequence: TTG
  source 1..20: mol_type = other DNA
acatcatttgtcctctgtgt

SEQ ID NO: 72950 - DNA, 20 bp, synthetic construct
  misc_feature 1..20: note = Description of Artificial Sequence: Synthetic oligonucleotide
  misc_feature 1..20: note = Target: SCN10A; (+) strand; PAM type: YTN; PAM sequence: TTT
  source 1..20: mol_type = other DNA
gtcctctgtgttttccattc

SEQ ID NO: 72951 - DNA, 20 bp, synthetic construct
  misc_feature 1..20: note = Description of Artificial Sequence: Synthetic oligonucleotide
  misc_feature 1..20: note = Target: SCN10A; (+) strand; PAM type: YTN; PAM sequence: TTG
  source 1..20: mol_type = other DNA
tcctctgtgttttccattct

SEQ ID NO: 72952 - DNA, 20 bp, synthetic construct
  misc_feature 1..20: note = Description of Artificial Sequence: Synthetic oligonucleotide
  misc_feature 1..20: note = Target: SCN10A; (+) strand; PAM type: YTN; PAM sequence: CTC
  source 1..20: mol_type = other DNA
tgtgttttccattctctttc

SEQ ID NO: 72953 - DNA, 20 bp, synthetic construct
  misc_feature 1..20: note = Description of Artificial Sequence: Synthetic oligonucleotide
  misc_feature 1..20: note = Target: SCN10A; (+) strand; PAM type: YTN; PAM sequence: CTG
  source 1..20: mol_type = other DNA
tgttttccattctctttctc

SEQ ID NO: 72954 - DNA, 20 bp, synthetic construct
  misc_feature 1..20: note = Description of Artificial Sequence: Synthetic oligonucleotide
  misc_feature 1..20: note = Target: SCN10A; (+) strand; PAM type: YTN; PAM sequence: TTT
  source 1..20: mol_type = other DNA
tccattctctttctctttgt

SEQ ID NO: 72955 - DNA, 20 bp, synthetic construct
  misc_feature 1..20: note = Description of Artificial Sequence: Synthetic oligonucleotide
  misc_feature 1..20: note = Target: SCN10A; (+) strand; PAM type: YTN; PAM sequence: TTT
  source 1..20: mol_type = other DNA
ccattctctttctctttgtt

SEQ ID NO: 72956 - DNA, 20 bp, synthetic construct
  misc_feature 1..20: note = Description of Artificial Sequence: Synthetic oligonucleotide
  misc_feature 1..20: note = Target: SCN10A; (+) strand; PAM type: YTN; PAM sequence: TTC
  source 1..20: mol_type = other DNA
cattctctttctctttgttc

SEQ ID NO: 72957 - DNA, 20 bp, synthetic construct
  misc_feature 1..20: note = Description of Artificial Sequence: Synthetic oligonucleotide
  misc_feature 1..20: note = Target: SCN10A; (+) strand; PAM type: YTN; PAM sequence: TTC
  source 1..20: mol_type = other DNA
tctttctctttgttcttgta

SEQ ID NO: 72958 - DNA, 20 bp, synthetic construct
  misc_feature 1..20: note = Description of Artificial Sequence: Synthetic oligonucleotide
  misc_feature 1..20: note = Target: SCN10A; (+) strand; PAM type: YTN; PAM sequence: CTC
  source 1..20: mol_type = other DNA
tttctctttgttcttgtata

SEQ ID NO: 72959 - DNA, 20 bp, synthetic construct
  misc_feature 1..20: note = Description of Artificial Sequence: Synthetic oligonucleotide
  misc_feature 1..20: note = Target: SCN10A; (+) strand; PAM type: YTN; PAM sequence: CTT
  source 1..20: mol_type = other DNA
tctctttgttcttgtatatt

SEQ ID NO: 72960 - DNA, 20 bp, synthetic construct
  misc_feature 1..20: note = Description of Artificial Sequence: Synthetic oligonucleotide
  misc_feature 1..20: note = Target: SCN10A; (+) strand; PAM type: YTN; PAM sequence: TTT
  source 1..20: mol_type = other DNA
ctctttgttcttgtatattt

SEQ ID NO: 72961 - DNA, 20 bp, synthetic construct
  misc_feature 1..20: note = Description of Artificial Sequence: Synthetic oligonucleotide
  misc_feature 1..20: note = Target: SCN10A; (+) strand; PAM type: YTN; PAM sequence: TTC
  source 1..20: mol_type = other DNA
tctttgttcttgtatattta

SEQ ID NO: 72962 - DNA, 20 bp, synthetic construct
  misc_feature 1..20: note = Description of Artificial Sequence: Synthetic oligonucleotide
  misc_feature 1..20: note = Target: SCN10A; (+) strand; PAM type: YTN; PAM sequence: CTC
  source 1..20: mol_type = other DNA
tttgttcttgtatatttata

SEQ ID NO: 72963 - DNA, 20 bp, synthetic construct
  misc_feature 1..20: note = Description of Artificial Sequence: Synthetic oligonucleotide
  misc_feature 1..20: note = Target: SCN10A; (+) strand; PAM type: YTN; PAM sequence: CTT
  source 1..20: mol_type = other DNA
tgttcttgtatatttatact

SEQ ID NO: 72964 - DNA, 20 bp, synthetic construct
  misc_feature 1..20: note = Description of Artificial Sequence: Synthetic oligonucleotide
  misc_feature 1..20: note = Target: SCN10A; (+) strand; PAM type: YTN; PAM sequence: TTT
  source 1..20: mol_type = other DNA
gttcttgtatatttatactg

SEQ ID NO: 72965 - DNA, 20 bp, synthetic construct
  misc_feature 1..20: note = Description of Artificial Sequence: Synthetic oligonucleotide
  misc_feature 1..20: note = Target: SCN10A; (+) strand; PAM type: YTN; PAM sequence: TTG
  source 1..20: mol_type = other DNA
ttcttgtatatttatactgt

SEQ ID NO: 72966 - DNA, 20 bp, synthetic construct
  misc_feature 1..20: note = Description of Artificial Sequence: Synthetic oligonucleotide
  misc_feature 1..20: note = Target: SCN10A; (+) strand; PAM type: YTN; PAM sequence: TTC
  source 1..20: mol_type = other DNA
ttgtatatttatactgttct

SEQ ID NO: 72967 - DNA, 20 bp, synthetic construct
  misc_feature 1..20: note = Description of Artificial Sequence: Synthetic oligonucleotide
  misc_feature 1..20: note = Target: SCN10A; (+) strand; PAM type: YTN; PAM sequence: CTT
  source 1..20: mol_type = other DNA
gtatatttatactgttcttt

SEQ ID NO: 72968 - DNA, 20 bp, synthetic construct
  misc_feature 1..20: note = Description of Artificial Sequence: Synthetic oligonucleotide
  misc_feature 1..20: note = Target: SCN10A; (+) strand; PAM type: YTN; PAM sequence: TTG
  source 1..20: mol_type = other DNA
tatatttatactgttctttc

SEQ ID NO: 72969 - DNA, 20 bp, synthetic construct
  misc_feature 1..20: note = Description of Artificial Sequence: Synthetic oligonucleotide
  misc_feature 1..20: note = Target: SCN10A; (+) strand; PAM type: YTN; PAM sequence: TTT
  source 1..20: mol_type = other DNA
atactgttctttcccccgtg

SEQ ID NO: 72970 - DNA, 20 bp, synthetic construct
  misc_feature 1..20: note = Description of Artificial Sequence: Synthetic oligonucleotide
  misc_feature 1..20: note = Target: SCN10A; (+) strand; PAM type: YTN; PAM sequence: TTA
  source 1..20: mol_type = other DNA
tactgttctttcccccgtgc

SEQ ID NO: 72971 - DNA, 20 bp, synthetic construct
  misc_feature 1..20: note = Description of Artificial Sequence: Synthetic oligonucleotide
  misc_feature 1..20: note = Target: SCN10A; (+) strand; PAM type: YTN; PAM sequence: CTG
  source 1..20: mol_type = other DNA
ttctttcccccgtgctgtca

SEQ ID NO: 72972 - DNA, 20 bp, synthetic construct
  misc_feature 1..20: note = Description of Artificial Sequence: Synthetic oligonucleotide
  misc_feature 1..20: note = Target: SCN10A; (+) strand; PAM type: YTN; PAM sequence: TTC
  source 1..20: mol_type = other DNA
tttcccccgtgctgtcattc

SEQ ID NO: 72973 - DNA, 20 bp, synthetic construct
  misc_feature 1..20: note = Description of Artificial Sequence: Synthetic oligonucleotide
  misc_feature 1..20: note = Target: SCN10A; (+) strand; PAM type: YTN; PAM sequence: CTT
  source 1..20: mol_type = other DNA
tcccccgtgctgtcattcta

SEQ ID NO: 72974 - DNA, 20 bp, synthetic construct
  misc_feature 1..20: note = Description of Artificial Sequence: Synthetic oligonucleotide
  misc_feature 1..20: note = Target: SCN10A; (+) strand; PAM type: YTN; PAM sequence: TTT
  source 1..20: mol_type = other DNA
cccccgtgctgtcattctat

SEQ ID NO: 72975 - DNA, 20 bp, synthetic construct
  misc_feature 1..20: note = Description of Artificial Sequence: Synthetic oligonucleotide
  misc_feature 1..20: note = Target: SCN10A; (+) strand; PAM type: YTN; PAM sequence: TTC
  source 1..20: mol_type = other DNA
ccccgtgctgtcattctatt

SEQ ID NO: 72976 - DNA, 20 bp, synthetic construct
  misc_feature 1..20: note = Description of Artificial Sequence: Synthetic oligonucleotide
  misc_feature 1..20: note = Target: SCN10A; (+) strand; PAM type: YTN; PAM sequence: CTG
  source 1..20: mol_type = other DNA
tcattctattggcattttga

SEQ ID NO: 72977 - DNA, 20 bp, synthetic construct
  misc_feature 1..20: note = Description of Artificial Sequence: Synthetic oligonucleotide
  misc_feature 1..20: note = Target: SCN10A; (+) strand; PAM type: YTN; PAM sequence: TTC
  source 1..20: mol_type = other DNA
tattggcattttgagagggt

SEQ ID NO: 72978 - DNA, 20 bp, synthetic construct
  misc_feature 1..20: note = Description of Artificial Sequence: Synthetic oligonucleotide
  misc_feature 1..20: note = Target: SCN10A; (+) strand; PAM type: YTN; PAM sequence: CTA
  source 1..20: mol_type = other DNA
ttggcattttgagagggtgg

SEQ ID NO: 72979 - DNA, 20 bp, synthetic construct
  misc_feature 1..20: note = Description of Artificial Sequence: Synthetic oligonucleotide
  misc_feature 1..20: note = Target: SCN10A; (+) strand; PAM type: YTN; PAM sequence: TTG
  source 1..20: mol_type = other DNA
gcattttgagagggtggggt

SEQ ID NO: 72980 - DNA, 20 bp, synthetic construct
  misc_feature 1..20: note = Description of Artificial Sequence: Synthetic oligonucleotide
  misc_feature 1..20: note = Target: SCN10A; (+) strand; PAM type: YTN; PAM sequence: TTT
  source 1..20: mol_type = other DNA
tgagagggtggggtaaaaca

SEQ ID NO: 72981 - DNA, 20 bp, synthetic construct
  misc_feature 1..20: note = Description of Artificial Sequence: Synthetic oligonucleotide
  misc_feature 1..20: note = Target: SCN10A; (+) strand; PAM type: YTN; PAM sequence: TTT
  source 1..20: mol_type = other DNA
gagagggtggggtaaaacat

SEQ ID NO: 72982 - DNA, 20 bp, synthetic construct
  misc_feature 1..20: note = Description of Artificial Sequence: Synthetic oligonucleotide
  misc_feature 1..20: note = Target: SCN10A; (+) strand; PAM type: YTN; PAM sequence: TTG
  source 1..20: mol_type = other DNA
agagggtggggtaaaacata

SEQ ID NO: 72983 - DNA, 20 bp, synthetic construct
  misc_feature 1..20: note = Description of Artificial Sequence: Synthetic oligonucleotide
  misc_feature 1..20: note = Target: SCN10A; (+) strand; PAM type: YTN; PAM sequence: TTC
  source 1..20: mol_type = other DNA
tatcttccatatttaaccac

SEQ ID NO: 72984 - DNA, 20 bp, synthetic construct
  misc_feature 1..20: note = Description of Artificial Sequence: Synthetic oligonucleotide
  misc_feature 1..20: note = Target: SCN10A; (+) strand; PAM type: YTN; PAM sequence: CTA
  source 1..20: mol_type = other DNA
tcttccatatttaaccacaa

SEQ ID NO: 72985 - DNA, 20 bp, synthetic construct
  misc_feature 1..20: note = Description of Artificial Sequence: Synthetic oligonucleotide
  misc_feature 1..20: note = Target: SCN10A; (+) strand; PAM type: YTN; PAM sequence: CTT
  source 1..20: mol_type = other DNA
ccatatttaaccacaatctc

SEQ ID NO: 72986 - DNA, 20 bp, synthetic construct
  misc_feature 1..20: note = Description of Artificial Sequence: Synthetic oligonucleotide
  misc_feature 1..20: note = Target: SCN10A; (+) strand; PAM type: YTN; PAM sequence: TTC
  source 1..20: mol_type = other DNA
catatttaaccacaatctcc

SEQ ID NO: 72987 - DNA, 20 bp, synthetic construct
  misc_feature 1..20: note = Description of Artificial Sequence: Synthetic oligonucleotide
  misc_feature 1..20: note = Target: SCN10A; (+) strand; PAM type: YTN; PAM sequence: TTT
  source 1..20: mol_type = other DNA
aaccacaatctccaaataac

SEQ ID NO: 72988 - DNA, 20 bp, synthetic construct
  misc_feature 1..20: note = Description of Artificial Sequence: Synthetic oligonucleotide
  misc_feature 1..20: note = Target: SCN10A; (+) strand; PAM type: YTN; PAM sequence: TTA
  source 1..20: mol_type = other DNA
accacaatctccaaataact

SEQ ID NO: 72989 - DNA, 20 bp, synthetic construct
  misc_feature 1..20: note = Description of Artificial Sequence: Synthetic oligonucleotide
  misc_feature 1..20: note = Target: SCN10A; (+) strand; PAM type: YTN; PAM sequence: CTC
  source 1..20: mol_type = other DNA
caaataactcccaaataact

SEQ ID NO: 72990 - DNA, 20 bp, synthetic construct
  misc_feature 1..20: note = Description of Artificial Sequence: Synthetic oligonucleotide
  misc_feature 1..20: note = Target: SCN10A; (+) strand; PAM type: YTN; PAM sequence: CTC
  source 1..20: mol_type = other DNA
ccaaataactcattttgcaa

SEQ ID NO: 72991 - DNA, 20 bp, synthetic construct
  misc_feature 1..20: note = Description of Artificial Sequence: Synthetic oligonucleotide
  misc_feature 1..20: note = Target: SCN10A; (+) strand; PAM type: YTN; PAM sequence: CTC
  source 1..20: mol_type = other DNA
attttgcaaaaaaatgtttt

SEQ ID NO: 72992 - DNA, 20 bp, synthetic construct
  misc_feature 1..20: note = Description of Artificial Sequence: Synthetic oligonucleotide
  misc_feature 1..20: note = Target: SCN10A; (+) strand; PAM type: YTN; PAM sequence: TTT
  source 1..20: mol_type = other DNA
tgcaaaaaaatgttttacat

SEQ ID NO: 72993 - DNA, 20 bp, synthetic construct
  misc_feature 1..20: note = Description of Artificial Sequence: Synthetic oligonucleotide
  misc_feature 1..20: note = Target: SCN10A; (+) strand; PAM type: YTN; PAM sequence: TTT
  source 1..20: mol_type = other DNA
gcaaaaaaatgttttacatt

SEQ ID NO: 72994 - DNA, 20 bp, synthetic construct
  misc_feature 1..20: note = Description of Artificial Sequence: Synthetic oligonucleotide
  misc_feature 1..20: note = Target: SCN10A; (+) strand; PAM type: YTN; PAM sequence: TTG
  source 1..20: mol_type = other DNA
caaaaaaatgttttacatta

SEQ ID NO: 72995 - DNA, 20 bp, synthetic construct
  misc_feature 1..20: note = Description of Artificial Sequence: Synthetic oligonucleotide
  misc_feature 1..20: note = Target: SCN10A; (+) strand; PAM type: YTN; PAM sequence: TTT
  source 1..20: mol_type = other DNA
tacattaaaactccaaaaga

SEQ ID NO: 72996 - DNA, 20 bp, synthetic construct
  misc_feature 1..20: note = Description of Artificial Sequence: Synthetic oligonucleotide
  misc_feature 1..20: note = Target: SCN10A; (+) strand; PAM type: YTN; PAM sequence: TTT
  source 1..20: mol_type = other DNA
acattaaaactccaaaagaa

SEQ ID NO: 72997 - DNA, 20 bp, synthetic construct
  misc_feature 1..20: note = Description of Artificial Sequence: Synthetic oligonucleotide
  misc_feature 1..20: note = Target: SCN10A; (+) strand; PAM type: YTN; PAM sequence: TTA
  source 1..20: mol_type = other DNA
cattaaaactccaaaagaag

SEQ ID NO: 72998 - DNA, 20 bp, synthetic construct
  misc_feature 1..20: note = Description of Artificial Sequence: Synthetic oligonucleotide
  misc_feature 1..20: note = Target: SCN10A; (+) strand; PAM type: YTN; PAM sequence: TTA
  source 1..20: mol_type = other DNA
aaactccaaaagaagcatag

SEQ ID NO: 72999 - DNA, 20 bp, synthetic construct
  misc_feature 1..20: note = Description of Artificial Sequence: Synthetic oligonucleotide
  misc_feature 1..20: note = Target: SCN10A; (+) strand; PAM type: YTN; PAM sequence: CTC
  source 1..20: mol_type = other DNA
caaaagaagcatagacattt

SEQ ID NO: 73000 - DNA, 20 bp, synthetic construct
  misc_feature 1..20: note = Description of Artificial Sequence: Synthetic oligonucleotide
  misc_feature 1..20: note = Target: SCN10A; (+) strand; PAM type: YTN; PAM sequence: TTT
  source 1..20: mol_type = other DNA
tacatgctatatgatctcaa

SEQ ID NO: 73001 - DNA, 20 bp, synthetic construct
  misc_feature 1..20: note = Description of Artificial Sequence: Synthetic oligonucleotide
  misc_feature 1..20: note = Target: SCN10A; (+) strand; PAM type: YTN; PAM sequence: TTT
  source 1..20: mol_type = other DNA
acatgctatatgatctcaac

SEQ ID NO: 73002 - DNA, 20 bp, synthetic construct
  misc_feature 1..20: note = Description of Artificial Sequence: Synthetic oligonucleotide
  misc_feature 1..20: note = Target: SCN10A; (+) strand; PAM type: YTN; PAM sequence: TTA
  source 1..20: mol_type = other DNA
catgctatatgatctcaaca

SEQ ID NO: 73003 - DNA, 20 bp, synthetic construct
  misc_feature 1..20: note = Description of Artificial Sequence: Synthetic oligonucleotide
  misc_feature 1..20: note = Target: SCN10A; (+) strand; PAM type: YTN; PAM sequence: CTA
  source 1..20: mol_type = other DNA
tatgatctcaacaatattaa

SEQ ID NO: 73004 - DNA, 20 bp, synthetic construct
  misc_feature 1..20: note = Description of Artificial Sequence: Synthetic oligonucleotide
  misc_feature 1..20: note = Target: SCN10A; (+) strand; PAM type: YTN; PAM sequence: CTC
  source 1..20: mol_type = other DNA
aacaatattaaatataattt

SEQ ID NO: 73005 - DNA, 20 bp, synthetic construct
  misc_feature 1..20: note = Description of Artificial Sequence: Synthetic oligonucleotide
  misc_feature 1..20: note = Target: SCN10A; (+) strand; PAM type: YTN; PAM sequence: TTA
  source 1..20: mol_type = other DNA
aatataatttcatgattttg

SEQ ID NO: 73006 - DNA, 20 bp, synthetic construct
  misc_feature 1..20: note = Description of Artificial Sequence: Synthetic oligonucleotide
  misc_feature 1..20: note = Target: SCN10A; (+) strand; PAM type: YTN; PAM sequence: TTT
  source 1..20: mol_type = other DNA
catgattttgtgatttctct

SEQ ID NO: 73007 - DNA, 20 bp, synthetic construct
  misc_feature 1..20: note = Description of Artificial Sequence: Synthetic oligonucleotide
  misc_feature 1..20: note = Target: SCN10A; (+) strand; PAM type: YTN; PAM sequence: TTC
  source 1..20: mol_type = other DNA
atgattttgtgatttctcta

SEQ ID NO: 73008 - DNA, 20 bp, synthetic construct
  misc_feature 1..20: note = Description of Artificial Sequence: Synthetic oligonucleotide
  misc_feature 1..20: note = Target: SCN10A; (+) strand; PAM type: YTN; PAM sequence: TTT
  source 1..20: mol_type = other DNA
tgtgatttctctacttagta

SEQ ID NO: 73009 - DNA, 20 bp, synthetic construct
  misc_feature 1..20: note = Description of Artificial Sequence: Synthetic oligonucleotide
  misc_feature 1..20: note = Target: SCN10A; (+) strand; PAM type: YTN; PAM sequence: TTT
  source 1..20: mol_type = other DNA
gtgatttctctacttagtaa

SEQ ID NO: 73010 - DNA, 20 bp, synthetic construct
  misc_feature 1..20: note = Description of Artificial Sequence: Synthetic oligonucleotide
  misc_feature 1..20: note = Target: SCN10A; (+) strand; PAM type: YTN; PAM sequence: TTG
  source 1..20: mol_type = other DNA
tgatttctctacttagtaac

SEQ ID NO: 73011 - DNA, 20 bp, synthetic construct
  misc_feature 1..20: note = Description of Artificial Sequence: Synthetic oligonucleotide
  misc_feature 1..20: note = Target: SCN10A; (+) strand; PAM type: YTN; PAM sequence: TTT
  source 1..20: mol_type = other DNA
ctctacttagtaaccatctt

SEQ ID NO: 73012 - DNA, 20 bp, synthetic construct
  misc_feature 1..20: note = Description of Artificial Sequence: Synthetic oligonucleotide
  misc_feature 1..20: note = Target: SCN10A; (+) strand; PAM type: YTN; PAM sequence: TTC
  source 1..20: mol_type = other DNA
tctacttagtaaccatcttc

SEQ ID NO: 73013 - DNA, 20 bp, synthetic construct
  misc_feature 1..20: note = Description of Artificial Sequence: Synthetic oligonucleotide
  misc_feature 1..20: note = Target: SCN10A; (+) strand; PAM type: YTN; PAM sequence: CTC
  source 1..20: mol_type = other DNA
tacttagtaaccatcttctg

SEQ ID NO: 73014 - DNA, 20 bp, synthetic construct
  misc_feature 1..20: note = Description of Artificial Sequence: Synthetic oligonucleotide
  misc_feature 1..20: note = Target: SCN10A; (+) strand; PAM type: YTN; PAM sequence: CTA
  source 1..20: mol_type = other DNA
cttagtaaccatcttctgat

SEQ ID NO: 73015 - DNA, 20 bp, synthetic construct
  misc_feature 1..20: note = Description of Artificial Sequence: Synthetic oligonucleotide
  misc_feature 1..20: note = Target: SCN10A; (+) strand; PAM type: YTN; PAM sequence: CTT
  source 1..20: mol_type = other DNA
agtaaccatcttctgattta

SEQ ID NO: 73016 - DNA, 20 bp, synthetic construct
  misc_feature 1..20: note = Description of Artificial Sequence: Synthetic oligonucleotide
  misc_feature 1..20: note = Target: SCN10A; (+) strand; PAM type: YTN; PAM sequence: TTA
  source 1..20: mol_type = other DNA
gtaaccatcttctgatttat

SEQ ID NO: 73017 - DNA, 20 bp, synthetic construct
  misc_feature 1..20: note = Description of Artificial Sequence: Synthetic oligonucleotide
  misc_feature 1..20: note = Target: SCN10A; (+) strand; PAM type: YTN; PAM sequence: CTT
  source 1..20: mol_type = other DNA
ctgatttatattttcagtgt

SEQ ID NO: 73018 - DNA, 20 bp, synthetic construct
  misc_feature 1..20: note = Description of Artificial Sequence: Synthetic oligonucleotide
  misc_feature 1..20: note = Target: SCN10A; (+) strand; PAM type: YTN; PAM sequence: TTC
  source 1..20: mol_type = other DNA
tgatttatattttcagtgtt

SEQ ID NO: 73019 - DNA, 20 bp, synthetic construct
  misc_feature 1..20: note = Description of Artificial Sequence: Synthetic oligonucleotide
  misc_feature 1..20: note = Target: SCN10A; (+) strand; PAM type: YTN; PAM sequence: CTG
  source 1..20: mol_type = other DNA
atttatattttcagtgttct

SEQ ID NO: 73020 - DNA, 20 bp, synthetic construct
  misc_feature 1..20: note = Description of Artificial Sequence: Synthetic oligonucleotide
  misc_feature 1..20: note = Target: SCN10A; (+) strand; PAM type: YTN; PAM sequence: TTT
  source 1..20: mol_type = other DNA
atattttcagtgttctgcat

SEQ ID NO: 73021 - DNA, 20 bp, synthetic construct
  misc_feature 1..20: note = Description of Artificial Sequence: Synthetic oligonucleotide
  misc_feature 1..20: note = Target: SCN10A; (+) strand; PAM type: YTN; PAM sequence: TTA
  source 1..20: mol_type = other DNA
tattttcagtgttctgcatt

SEQ ID NO: 73022 - DNA, 20 bp, synthetic construct
  misc_feature 1..20: note = Description of Artificial Sequence: Synthetic oligonucleotide
  misc_feature 1..20: note = Target: SCN10A; (+) strand; PAM type: YTN; PAM sequence: TTT
  source 1..20: mol_type = other DNA
tcagtgttctgcattttttg

SEQ ID NO: 73023 - DNA, 20 bp, synthetic construct
  misc_feature 1..20: note = Description of Artificial Sequence: Synthetic oligonucleotide
  misc_feature 1..20: note = Target: SCN10A; (+) strand; PAM type: YTN; PAM sequence: TTT
  source 1..20: mol_type = other DNA
cagtgttctgcattttttgc

SEQ ID NO: 73024 - DNA, 20 bp, synthetic construct
  misc_feature 1..20: note = Description of Artificial Sequence: Synthetic oligonucleotide
  misc_feature 1..20: note = Target: SCN10A; (+) strand; PAM type: YTN; PAM sequence: TTC
  source 1..20: mol_type = other DNA
agtgttctgcattttttgca

SEQ ID NO: 73025 - DNA, 20 bp, synthetic construct
  misc_feature 1..20: note = Description of Artificial Sequence: Synthetic oligonucleotide
  misc_feature 1..20: note = Target: SCN10A; (+) strand; PAM type: YTN; PAM sequence: TTC
  source 1..20: mol_type = other DNA
tgcattttttgcaatggtca

SEQ ID NO: 73026 - DNA, 20 bp, synthetic construct
  misc_feature 1..20: note = Description of Artificial Sequence: Synthetic oligonucleotide
  misc_feature 1..20: note = Target: SCN10A; (+) strand; PAM type: YTN; PAM sequence: CTG
  source 1..20: mol_type = other DNA
cattttttgcaatggtcatt

SEQ ID NO: 73027 - DNA, 20 bp, synthetic construct
  misc_feature 1..20: note = Description of Artificial Sequence: Synthetic oligonucleotide
  misc_feature 1..20: note = Target: SCN10A; (+) strand; PAM type: YTN; PAM sequence: TTT
  source 1..20: mol_type = other DNA
tttgcaatggtcatttattt

SEQ ID NO: 73028 - DNA, 20 bp, synthetic construct
  misc_feature 1..20: note = Description of Artificial Sequence: Synthetic oligonucleotide
  misc_feature 1..20: note = Target: SCN10A; (+) strand; PAM type: YTN; PAM sequence: TTT
  source 1..20: mol_type = other DNA
ttgcaatggtcatttatttt

SEQ ID NO: 73029 - DNA, 20 bp, synthetic construct
  misc_feature 1..20: note = Description of Artificial Sequence: Synthetic oligonucleotide
  misc_feature 1..20: note = Target: SCN10A; (+) strand; PAM type: YTN; PAM sequence: TTT
  source 1..20: mol_type = other DNA
tgcaatggtcatttatttta

SEQ ID NO: 73030 - DNA, 20 bp, synthetic construct
  misc_feature 1..20: note = Description of Artificial Sequence: Synthetic oligonucleotide
  misc_feature 1..20: note = Target: SCN10A; (+) strand; PAM type: YTN; PAM sequence: TTT
  source 1..20: mol_type = other DNA
gcaatggtcatttattttaa

SEQ ID NO: 73031 - DNA, 20 bp, synthetic construct
  misc_feature 1..20: note = Description of Artificial Sequence: Synthetic oligonucleotide
  misc_feature 1..20: note = Target: SCN10A; (+) strand; PAM type: YTN; PAM sequence: TTG
  source 1..20: mol_type = other DNA
caatggtcatttattttaaa

SEQ ID NO: 73032 - DNA, 20 bp, synthetic construct
  misc_feature 1..20: note = Description of Artificial Sequence: Synthetic oligonucleotide
  misc_feature 1..20: note = Target: SCN10A; (+) strand; PAM type: YTN; PAM sequence: TTT
  source 1..20: mol_type = other DNA
attttaaaaaattattgggt

SEQ ID NO: 73033 - DNA, 20 bp, synthetic construct
  misc_feature 1..20: note = Description of Artificial Sequence: Synthetic oligonucleotide
  misc_feature 1..20: note = Target: SCN10A; (+) strand; PAM type: YTN; PAM sequence: TTA
  source 1..20: mol_type = other DNA
ttttaaaaaattattgggtt

SEQ ID NO: 73034 - DNA, 20 bp, synthetic construct
  misc_feature 1..20: note = Description of Artificial Sequence: Synthetic oligonucleotide
  misc_feature 1..20: note = Target: SCN10A; (+) strand; PAM type: YTN; PAM sequence: TTT
  source 1..20: mol_type = other DNA
taaaaaattattgggttttt

SEQ ID NO: 73035 - DNA, 20 bp, synthetic construct
  misc_feature 1..20: note = Description of Artificial Sequence: Synthetic oligonucleotide
  misc_feature 1..20: note = Target: SCN10A; (+) strand; PAM type: YTN; PAM sequence: TTT
  source 1..20: mol_type = other DNA
aaaaaattattgggttttta

SEQ ID NO: 73036 - DNA, 20 bp, synthetic construct
  misc_feature 1..20: note = Description of Artificial Sequence: Synthetic oligonucleotide
  misc_feature 1..20: note = Target: SCN10A; (+) strand; PAM type: YTN; PAM sequence: TTA
  source 1..20: mol_type = other DNA
aaaaattattgggtttttat

SEQ ID NO: 73037 - DNA, 20 bp, synthetic construct
  misc_feature 1..20: note = Description of Artificial Sequence: Synthetic oligonucleotide
  misc_feature 1..20: note = Target: SCN10A; (+) strand; PAM type: YTN; PAM sequence: TTA
  source 1..20: mol_type = other DNA
ttgggtttttattatgatat

SEQ ID NO: 73038 - DNA, 20 bp, synthetic construct
  misc_feature 1..20: note = Description of Artificial Sequence: Synthetic oligonucleotide
  misc_feature 1..20: note = Target: SCN10A; (+) strand; PAM type: YTN; PAM sequence: TTG
  source 1..20: mol_type = other DNA
ggtttttattatgatatgta

SEQ ID NO: 73039 - DNA, 20 bp, synthetic construct
  misc_feature 1..20: note = Description of Artificial Sequence: Synthetic oligonucleotide
  misc_feature 1..20: note = Target: SCN10A; (+) strand; PAM type: YTN; PAM sequence: TTT
  source 1..20: mol_type = other DNA
ttattatgatatgtaacatg

SEQ ID NO: 73040 - DNA, 20 bp, synthetic construct
  misc_feature 1..20: note = Description of Artificial Sequence: Synthetic oligonucleotide
  misc_feature 1..20: note = Target: SCN10A; (+) strand; PAM type: YTN; PAM sequence: TTT
  source 1..20: mol_type = other DNA
tattatgatatgtaacatgc

SEQ ID NO: 73041 - DNA, 20 bp, synthetic construct
  misc_feature 1..20: note = Description of Artificial Sequence: Synthetic oligonucleotide
  misc_feature 1..20: note = Target: SCN10A; (+) strand; PAM type: YTN; PAM sequence: TTT
  source 1..20: mol_type = other DNA
attatgatatgtaacatgca

SEQ ID NO: 73042 - DNA, 20 bp, synthetic construct
  misc_feature 1..20: note = Description of Artificial Sequence: Synthetic oligonucleotide
  misc_feature 1..20: note = Target: SCN10A; (+) strand; PAM type: YTN; PAM sequence: TTA
  source 1..20: mol_type = other DNA
ttatgatatgtaacatgcat

SEQ ID NO: 73043 - DNA, 20 bp, synthetic construct
  misc_feature 1..20: note = Description of Artificial Sequence: Synthetic oligonucleotide
  misc_feature 1..20: note = Target: SCN10A; (+) strand; PAM type: YTN; PAM sequence: TTA
  source 1..20: mol_type = other DNA
tgatatgtaacatgcataat

SEQ ID NO: 73044 - DNA, 20 bp, synthetic construct
  misc_feature 1..20: note = Description of Artificial Sequence: Synthetic oligonucleotide
  misc_feature 1..20: note = Target: SCN10A; (+) strand; PAM type: YTN; PAM sequence: TTA
  source 1..20: mol_type = other DNA
attattttaaaacaaatgtt

SEQ ID NO: 73045 - DNA, 20 bp, synthetic construct
  misc_feature 1..20: note = Description of Artificial Sequence: Synthetic oligonucleotide
  misc_feature 1..20: note = Target: SCN10A; (+) strand; PAM type: YTN; PAM sequence: TTA
  source 1..20: mol_type = other DNA
ttttaaaacaaatgtttgtg

SEQ ID NO: 73046 - DNA, 20 bp, synthetic construct
  misc_feature 1..20: note = Description of Artificial Sequence: Synthetic oligonucleotide
  misc_feature 1..20: note = Target: SCN10A; (+) strand; PAM type: YTN; PAM sequence: TTT
  source 1..20: mol_type = other DNA
taaaacaaatgtttgtgtat

SEQ ID NO: 73047 - DNA, 20 bp, synthetic construct
  misc_feature 1..20: note = Description of Artificial Sequence: Synthetic oligonucleotide
  misc_feature 1..20: note = Target: SCN10A; (+) strand; PAM type: YTN; PAM sequence: TTT
  source 1..20: mol_type = other DNA
aaaacaaatgtttgtgtatt

SEQ ID NO: 73048 - DNA, 20 bp, synthetic construct
  misc_feature 1..20: note = Description of Artificial Sequence: Synthetic oligonucleotide
  misc_feature 1..20: note = Target: SCN10A; (+) strand; PAM type: YTN; PAM sequence: TTA
  source 1..20: mol_type = other DNA
aaacaaatgtttgtgtatta

SEQ ID NO: 73049 - DNA, 20 bp, synthetic construct
  misc_feature 1..20: note = Description of Artificial Sequence: Synthetic oligonucleotide
  misc_feature 1..20: note = Target: SCN10A; (+) strand; PAM type: YTN; PAM sequence: TTT
  source 1..20: mol_type = other DNA
gtgtattagtcagcctttgt

SEQ ID NO: 73050 - DNA, 20 bp, synthetic construct
  misc_feature 1..20: note = Description of Artificial Sequence: Synthetic oligonucleotide
  misc_feature 1..20: note = Target: SCN10A; (+) strand; PAM type: YTN; PAM sequence: TTG
  source 1..20: mol_type = other DNA
tgtattagtcagcctttgtt

SEQ ID NO: 73051 - DNA, 20 bp, synthetic construct
  misc_feature 1..20: note = Description of Artificial Sequence: Synthetic oligonucleotide
  misc_feature 1..20: note = Target: SCN10A; (+) strand; PAM type: YTN; PAM sequence: TTA
  source 1..20: mol_type = other DNA
gtcagcctttgttgccttaa

SEQ ID NO: 73052 - DNA, 20 bp, synthetic construct
  misc_feature 1..20: note = Description of Artificial Sequence: Synthetic oligonucleotide
  misc_feature 1..20: note = Target: SCN10A; (+) strand; PAM type: YTN; PAM sequence: CTT
  source 1..20: mol_type = other DNA
tgttgccttaacaaaatacc

SEQ ID NO: 73053 - DNA, 20 bp, synthetic construct
  misc_feature 1..20: note = Description of Artificial Sequence: Synthetic oligonucleotide
  misc_feature 1..20: note = Target: SCN10A; (+) strand; PAM type: YTN; PAM sequence: TTT
  source 1..20: mol_type = other DNA
gttgccttaacaaaatacca

SEQ ID NO: 73054 - DNA, 20 bp, synthetic construct
  misc_feature 1..20: note = Description of Artificial Sequence: Synthetic oligonucleotide
  misc_feature 1..20: note = Target: SCN10A; (+) strand; PAM type: YTN; PAM sequence: TTG
  source 1..20: mol_type = other DNA
ttgccttaacaaaataccat

SEQ ID NO: 73055 - DNA, 20 bp, synthetic construct
  misc_feature 1..20: note = Description of Artificial Sequence: Synthetic oligonucleotide
  misc_feature 1..20: note = Target: SCN10A; (+) strand; PAM type: YTN; PAM sequence: TTG
  source 1..20: mol_type = other DNA
ccttaacaaaataccataga

SEQ ID NO: 73056 - DNA, 20 bp, synthetic construct
  misc_feature 1..20: note = Description of Artificial Sequence: Synthetic oligonucleotide
  misc_feature 1..20: note = Target: SCN10A; (+) strand; PAM type: YTN; PAM sequence: CTT
  source 1..20: mol_type = other DNA
aacaaaataccatagactgg

SEQ ID NO: 73057 - DNA, 20 bp, synthetic construct
  misc_feature 1..20: note = Description of Artificial Sequence: Synthetic oligonucleotide
  misc_feature 1..20: note = Target: SCN10A; (+) strand; PAM type: YTN; PAM sequence: TTA
  source 1..20: mol_type = other DNA
acaaaataccatagactggg

SEQ ID NO: 73058 - DNA, 20 bp, synthetic construct
  misc_feature 1..20: note = Description of Artificial Sequence: Synthetic oligonucleotide
  misc_feature 1..20: note = Target: SCN10A; (+) strand; PAM type: YTN; PAM sequence: CTG
  source 1..20: mol_type = other DNA
ggtggcttatgcaacagaaa

SEQ ID NO: 73059 - DNA, 20 bp, synthetic construct
  misc_feature 1..20: note = Description of Artificial Sequence: Synthetic oligonucleotide
  misc_feature 1..20: note = Target: SCN10A; (+) strand; PAM type: YTN; PAM sequence: CTT
  source 1..20: mol_type = other DNA
atgcaacagaaatttatttt

SEQ ID NO: 73060 - DNA, 20 bp, synthetic construct
  misc_feature 1..20: note = Description of Artificial Sequence: Synthetic oligonucleotide
  misc_feature 1..20: note = Target: SCN10A; (+) strand; PAM type: YTN; PAM sequence: TTA
  source 1..20: mol_type = other DNA
tgcaacagaaatttattttc

SEQ ID NO: 73061 - DNA, 20 bp, synthetic construct
  misc_feature 1..20: note = Description of Artificial Sequence: Synthetic oligonucleotide
  misc_feature 1..20: note = Target: SCN10A; (+) strand; PAM type: YTN; PAM sequence: TTT
  source 1..20: mol_type = other DNA
attttctcacaaatctggag

SEQ ID NO: 73062 - DNA, 20 bp, synthetic construct
  misc_feature 1..20: note = Description of Artificial Sequence: Synthetic oligonucleotide
  misc_feature 1..20: note = Target: SCN10A; (+) strand; PAM type: YTN; PAM sequence: TTA
  source 1..20: mol_type = other DNA
ttttctcacaaatctggagg

SEQ ID NO: 73063 - DNA, 20 bp, synthetic construct
  misc_feature 1..20: note = Description of Artificial Sequence: Synthetic oligonucleotide
  misc_feature 1..20: note = Target: SCN10A; (+) strand; PAM type: YTN; PAM sequence: TTT
  source 1..20: mol_type = other DNA
tctcacaaatctggaggttg

SEQ ID NO: 73064 - DNA, 20 bp, synthetic construct
  misc_feature 1..20: note = Description of Artificial Sequence: Synthetic oligonucleotide
  misc_feature 1..20: note = Target: SCN10A; (+) strand; PAM type: YTN; PAM sequence: TTT
  source 1..20: mol_type = other DNA
ctcacaaatctggaggttga

SEQ ID NO: 73065 - DNA, 20 bp, synthetic construct
  misc_feature 1..20: note = Description of Artificial Sequence: Synthetic oligonucleotide
  misc_feature 1..20: note = Target: SCN10A; (+) strand; PAM type: YTN; PAM sequence: TTC
  source 1..20: mol_type = other DNA
tcacaaatctggaggttgaa

SEQ ID NO: 73066 - DNA, 20 bp, synthetic construct
  misc_feature 1..20: note = Description of Artificial Sequence: Synthetic oligonucleotide
  misc_feature 1..20: note = Target: SCN10A; (+) strand; PAM type: YTN; PAM sequence: CTC
  source 1..20: mol_type = other DNA
acaaatctggaggttgaagc

SEQ ID NO: 73067 - DNA, 20 bp, synthetic construct
  misc_feature 1..20: note = Description of Artificial Sequence: Synthetic oligonucleotide
  misc_feature 1..20: note = Target: SCN10A; (+) strand; PAM type: YTN; PAM sequence: CTG
  source 1..20: mol_type = other DNA
gaggttgaagcctgagattg

SEQ ID NO: 73068 - DNA, 20 bp, synthetic construct
  misc_feature 1..20: note = Description of Artificial Sequence: Synthetic oligonucleotide
  misc_feature 1..20: note = Target: SCN10A; (+) strand; PAM type: YTN; PAM sequence: TTG
  source 1..20: mol_type = other DNA
aagcctgagattgggatgtc

SEQ ID NO: 73069 - DNA, 20 bp, synthetic construct
  misc_feature 1..20: note = Description of Artificial Sequence: Synthetic oligonucleotide
  misc_feature 1..20: note = Target: SCN10A; (+) strand; PAM type: YTN; PAM sequence: CTG
  source 1..20: mol_type = other DNA
agattgggatgtcagcatag

SEQ ID NO: 73070 - DNA, 20 bp, synthetic construct
  misc_feature 1..20: note = Description of Artificial Sequence: Synthetic oligonucleotide
  misc_feature 1..20: note = Target: SCN10A; (+) strand; PAM type: YTN; PAM sequence: TTG
  source 1..20: mol_type = other DNA
ggatgtcagcatagttgggt

SEQ ID NO: 73071 - DNA, 20 bp, synthetic construct
  misc_feature 1..20: note = Description of Artificial Sequence: Synthetic oligonucleotide
  misc_feature 1..20: note = Target: SCN10A; (+) strand; PAM type: YTN; PAM sequence: TTG
  source 1..20: mol_type = other DNA
ggtctgggaaagactctctt

SEQ ID NO: 73072 - DNA, 20 bp, synthetic construct
  misc_feature 1..20: note = Description of Artificial Sequence: Synthetic oligonucleotide
  misc_feature 1..20: note = Target: SCN10A; (+) strand; PAM type: YTN; PAM sequence: CTG
  source 1..20: mol_type = other DNA
ggaaagactctctttctagc

SEQ ID NO: 73073 - DNA, 20 bp, synthetic construct
  misc_feature 1..20: note = Description of Artificial Sequence: Synthetic oligonucleotide
  misc_feature 1..20: note = Target: SCN10A; (+) strand; PAM type: YTN; PAM sequence: CTC
  source 1..20: mol_type = other DNA
tctttctagcttatagatgt

SEQ ID NO: 73074 - DNA, 20 bp, synthetic construct
  misc_feature 1..20: note = Description of Artificial Sequence: Synthetic oligonucleotide
  misc_feature 1..20: note = Target: SCN10A; (+) strand; PAM type: YTN; PAM sequence: CTC
  source 1..20: mol_type = other DNA
tttctagcttatagatgtct

SEQ ID NO: 73075 - DNA, 20 bp, synthetic construct
  misc_feature 1..20: note = Description of Artificial Sequence: Synthetic oligonucleotide
  misc_feature 1..20: note = Target: SCN10A; (+) strand; PAM type: YTN; PAM sequence: CTT
  source 1..20: mol_type = other DNA
tctagcttatagatgtctac

SEQ ID NO: 73076 - DNA, 20 bp, synthetic construct
  misc_feature 1..20: note = Description of Artificial Sequence: Synthetic oligonucleotide
  misc_feature 1..20: note = Target: SCN10A; (+) strand; PAM type: YTN; PAM sequence: TTT
  source 1..20: mol_type = other DNA
ctagcttatagatgtctacc

SEQ ID NO: 73077 - DNA, 20 bp, synthetic construct
  misc_feature 1..20: note = Description of Artificial Sequence: Synthetic oligonucleotide
  misc_feature 1..20: note = Target: SCN10A; (+) strand; PAM type: YTN; PAM sequence: TTC
  source 1..20: mol_type = other DNA
tagcttatagatgtctacct

SEQ ID NO: 73078 - DNA, 20 bp, synthetic construct
  misc_feature 1..20: note = Description of Artificial Sequence: Synthetic oligonucleotide
  misc_feature 1..20: note = Target: SCN10A; (+) strand; PAM type: YTN; PAM sequence: CTA
  source 1..20: mol_type = other DNA
gcttatagatgtctaccttg

SEQ ID NO: 73079 - DNA, 20 bp, synthetic construct
  misc_feature 1..20: note = Description of Artificial Sequence: Synthetic oligonucleotide
  misc_feature 1..20: note = Target: SCN10A; (+) strand; PAM type: YTN; PAM sequence: CTT
  source 1..20: mol_type = other DNA
atagatgtctaccttgtcct

SEQ ID NO: 73080 - DNA, 20 bp, synthetic construct
  misc_feature 1..20: note = Description of Artificial Sequence: Synthetic oligonucleotide
  misc_feature 1..20: note = Target: SCN10A; (+) strand; PAM type: YTN; PAM sequence: TTA
  source 1..20: mol_type = other DNA
tagatgtctaccttgtcctt

SEQ ID NO: 73081 - DNA, 20 bp, synthetic construct
  misc_feature 1..20: note = Description of Artificial Sequence: Synthetic oligonucleotide
  misc_feature 1..20: note = Target: SCN10A; (+) strand; PAM type: YTN; PAM sequence: CTA
  source 1..20: mol_type = other DNA
ccttgtccttgtgttctcac

SEQ ID NO: 73082 - DNA, 20 bp, synthetic construct
  misc_feature 1..20: note = Description of Artificial Sequence: Synthetic oligonucleotide
  misc_feature 1..20: note = Target: SCN10A; (+) strand; PAM type: YTN; PAM sequence: CTT
  source 1..20: mol_type = other DNA
gtccttgtgttctcacacaa

SEQ ID NO: 73083 - DNA, 20 bp, synthetic construct
  misc_feature 1..20: note = Description of Artificial Sequence: Synthetic oligonucleotide
  misc_feature 1..20: note = Target: SCN10A; (+) strand; PAM type: YTN; PAM sequence: TTG
  source 1..20: mol_type = other DNA
tccttgtgttctcacacaaa

SEQ ID NO: 73084 - DNA, 20 bp, synthetic construct
  misc_feature 1..20: note = Description of Artificial Sequence: Synthetic oligonucleotide
  misc_feature 1..20: note = Target: SCN10A; (+) strand; PAM type: YTN; PAM sequence: CTT
  source 1..20: mol_type = other DNA
gtgttctcacacaaagggga

SEQ ID NO: 73085 - DNA, 20 bp, synthetic construct
  misc_feature 1..20: note = Description of Artificial Sequence: Synthetic oligonucleotide
  misc_feature 1..20: note = Target: SCN10A; (+) strand; PAM type: YTN; PAM sequence: TTG
  source 1..20: mol_type = other DNA
tgttctcacacaaaggggag

SEQ ID NO: 73086 - DNA, 20 bp, synthetic construct
  misc_feature 1..20: note = Description of Artificial Sequence: Synthetic oligonucleotide
  misc_feature 1..20: note = Target: SCN10A; (+) strand; PAM type: YTN; PAM sequence: TTC
  source 1..20: mol_type = other DNA
tcacacaaaggggagaaagc

SEQ ID NO: 73087 - DNA, 20 bp, synthetic construct
  misc_feature 1..20: note = Description of Artificial Sequence: Synthetic oligonucleotide
  misc_feature 1..20: note = Target: SCN10A; (+) strand; PAM type: YTN; PAM sequence: CTC
  source 1..20: mol_type = other DNA
acacaaaggggagaaagctg

SEQ ID NO: 73088 - DNA, 20 bp, synthetic construct
  misc_feature 1..20: note = Description of Artificial Sequence: Synthetic oligonucleotide
  misc_feature 1..20: note = Target: SCN10A; (+) strand; PAM type: YTN; PAM sequence: CTG
  source 1..20: mol_type = other DNA
tctctttctcttataaggac

SEQ ID NO: 73089 - DNA, 20 bp, synthetic construct
  misc_feature 1..20: note = Description of Artificial Sequence: Synthetic oligonucleotide
  misc_feature 1..20: note = Target: SCN10A; (+) strand; PAM type: YTN; PAM sequence: CTC
  source 1..20: mol_type = other DNA
tttctcttataaggacacca

SEQ ID NO: 73090 - DNA, 20 bp, synthetic construct
  misc_feature 1..20: note = Description of Artificial Sequence: Synthetic oligonucleotide
  misc_feature 1..20: note = Target: SCN10A; (+) strand; PAM type: YTN; PAM sequence: CTT
  source 1..20: mol_type = other DNA
tctcttataaggacaccagt

SEQ ID NO: 73091 - DNA, 20 bp, synthetic construct
  misc_feature 1..20: note = Description of Artificial Sequence: Synthetic oligonucleotide
  misc_feature 1..20: note = Target: SCN10A; (+) strand; PAM type: YTN; PAM sequence: TTT
  source 1..20: mol_type = other DNA
ctcttataaggacaccagtt

SEQ ID NO: 73092 - DNA, 20 bp, synthetic construct
  misc_feature 1..20: note = Description of Artificial Sequence: Synthetic oligonucleotide
  misc_feature 1..20: note = Target: SCN10A; (+) strand; PAM type: YTN; PAM sequence: TTC
  source 1..20: mol_type = other DNA
tcttataaggacaccagttc

SEQ ID NO: 73093 - DNA, 20 bp, synthetic construct
  misc_feature 1..20: note = Description of Artificial Sequence: Synthetic oligonucleotide
  misc_feature 1..20: note = Target: SCN10A; (+) strand; PAM type: YTN; PAM sequence: CTC
  source 1..20: mol_type = other DNA
ttataaggacaccagttcta

SEQ ID NO: 73094 - DNA, 20 bp, synthetic construct
  misc_feature 1..20: note = Description of Artificial Sequence: Synthetic oligonucleotide
  misc_feature 1..20: note = Target: SCN10A; (+) strand; PAM type: YTN; PAM sequence: CTT
  source 1..20: mol_type = other DNA
ataaggacaccagttctacc

SEQ ID NO: 73095 - DNA, 20 bp, synthetic construct
  misc_feature 1..20: note = Description of Artificial Sequence: Synthetic oligonucleotide
  misc_feature 1..20: note = Target: SCN10A; (+) strand; PAM type: YTN; PAM sequence: TTA
  source 1..20: mol_type = other DNA
taaggacaccagttctacca

SEQ ID NO: 73096 - DNA, 20 bp, synthetic construct
  misc_feature 1..20: note = Description of Artificial Sequence: Synthetic oligonucleotide
  misc_feature 1..20: note = Target: SCN10A; (+) strand; PAM type: YTN; PAM sequence: TTC
  source 1..20: mol_type = other DNA
taccacttaagggctctact

SEQ ID NO: 73097 - DNA, 20 bp, synthetic construct
  misc_feature 1..20: note = Description of Artificial Sequence: Synthetic oligonucleotide
  misc_feature 1..20: note = Target: SCN10A; (+) strand; PAM type: YTN; PAM sequence: CTA
  source 1..20: mol_type = other DNA
ccacttaagggctctactct

SEQ ID NO: 73098 - DNA, 20 bp, synthetic construct
  misc_feature 1..20: note = Description of Artificial Sequence: Synthetic oligonucleotide
  misc_feature 1..20: note = Target: SCN10A; (+) strand; PAM type: YTN; PAM sequence: CTT
  source 1..20: mol_type = other DNA
aagggctctactcttgtgac

SEQ ID NO: 73099 - DNA, 20 bp, synthetic construct
  misc_feature 1..20: note = Description of Artificial Sequence: Synthetic oligonucleotide
  misc_feature 1..20: note = Target: SCN10A; (+) strand; PAM type: YTN; PAM sequence: TTA
  source 1..20: mol_type = other DNA
agggctctactcttgtgact

SEQ ID NO: 73100 - DNA, 20 bp, synthetic construct
  misc_feature 1..20: note = Description of Artificial Sequence: Synthetic oligonucleotide
  misc_feature 1..20: note = Target: SCN10A; (+) strand; PAM type: YTN; PAM sequence: CTC
  source 1..20: mol_type = other DNA
tactcttgtgacttcattta

SEQ ID NO: 73101 - DNA, 20 bp, synthetic construct
  misc_feature 1..20: note = Description of Artificial Sequence: Synthetic oligonucleotide
  misc_feature 1..20: note = Target: SCN10A; (+) strand; PAM type: YTN; PAM sequence: CTA
  source 1..20: mol_type = other DNA
ctcttgtgacttcatttaac

SEQ ID NO: 73102 - DNA, 20 bp, synthetic construct
  misc_feature 1..20: note = Description of Artificial Sequence: Synthetic oligonucleotide
  misc_feature 1..20: note = Target: SCN10A; (+) strand; PAM type: YTN; PAM sequence: CTC
  source 1..20: mol_type = other DNA
ttgtgacttcatttaaccca

SEQ ID NO: 73103 - DNA, 20 bp, synthetic construct
  misc_feature 1..20: note = Description of Artificial Sequence: Synthetic oligonucleotide
  misc_feature 1..20: note = Target: SCN10A; (+) strand; PAM type: YTN; PAM sequence: CTT
  source 1..20: mol_type = other DNA
gtgacttcatttaacccaat

SEQ ID NO: 73104 - DNA, 20 bp, synthetic construct
  misc_feature 1..20: note = Description of Artificial Sequence: Synthetic oligonucleotide
  misc_feature 1..20: note = Target: SCN10A; (+) strand; PAM type: YTN; PAM sequence: TTG
  source 1..20: mol_type = other DNA
tgacttcatttaacccaatc

SEQ ID NO: 73105 - DNA, 20 bp, synthetic construct
  misc_feature 1..20: note = Description of Artificial Sequence: Synthetic oligonucleotide
  misc_feature 1..20: note = Target: SCN10A; (+) strand; PAM type: YTN; PAM sequence: CTT
  source 1..20: mol_type = other DNA
catttaacccaatcacctcc

SEQ ID NO: 73106 - DNA, 20 bp, synthetic construct
  misc_feature 1..20: note = Description of Artificial Sequence: Synthetic oligonucleotide
  misc_feature 1..20: note = Target: SCN10A; (+) strand; PAM type: YTN; PAM sequence: TTC
  source 1..20: mol_type = other DNA
atttaacccaatcacctcct

SEQ ID NO: 73107 - DNA, 20 bp, synthetic construct
  misc_feature 1..20: note = Description of Artificial Sequence: Synthetic oligonucleotide
  misc_feature 1..20: note = Target: SCN10A; (+) strand; PAM type: YTN; PAM sequence: TTT
  source 1..20: mol_type = other DNA
aacccaatcacctccttaga

SEQ ID NO: 73108 - DNA, 20 bp, synthetic construct
  misc_feature 1..20: note = Description of Artificial Sequence: Synthetic oligonucleotide
  misc_feature 1..20: note = Target: SCN10A; (+) strand; PAM type: YTN; PAM sequence: TTA
  source 1..20: mol_type = other DNA
acccaatcacctccttagag

SEQ ID NO: 73109 - DNA, 20 bp, synthetic construct
  misc_feature 1..20: note = Description of Artificial Sequence: Synthetic oligonucleotide
  misc_feature 1..20: note = Target: SCN10A; (+) strand; PAM type: YTN; PAM sequence: CTC
  source 1..20: mol_type = other DNA
cttagaggcccaatctccaa

SEQ ID NO: 73110 - DNA, 20 bp, synthetic construct
  misc_feature 1..20: note = Description of Artificial Sequence: Synthetic oligonucleotide
  misc_feature 1..20: note = Target: SCN10A; (+) strand; PAM type: YTN; PAM sequence: CTT
  source 1..20: mol_type = other DNA
agaggcccaatctccaacat

SEQ ID NO: 73111 - DNA, 20 bp, synthetic construct
  misc_feature 1..20: note = Description of Artificial Sequence: Synthetic oligonucleotide
  misc_feature 1..20: note = Target: SCN10A; (+) strand; PAM type: YTN; PAM sequence: TTA
  source 1..20: mol_type = other DNA
gaggcccaatctccaacata

SEQ ID NO: 73112 - DNA, 20 bp, synthetic construct
  misc_feature 1..20: note = Description of Artificial Sequence: Synthetic oligonucleotide
  misc_feature 1..20: note = Target: SCN10A; (+) strand; PAM type: YTN; PAM sequence: CTC
  source 1..20: mol_type = other DNA
caacatagcaacatgggggg

SEQ ID NO: 73113 - DNA, 20 bp, synthetic construct
  misc_feature 1..20: note = Description of Artificial Sequence: Synthetic oligonucleotide
  misc_feature 1..20: note = Target: SCN10A; (+) strand; PAM type: YTN; PAM sequence: TTT
  source 1..20: mol_type = other DNA
gtttcaacatttgaattttg

SEQ ID NO: 73114 - DNA, 20 bp, synthetic construct
  misc_feature 1..20: note = Description of Artificial Sequence: Synthetic oligonucleotide
  misc_feature 1..20: note = Target: SCN10A; (+) strand; PAM type: YTN; PAM sequence: TTG
  source 1..20: mol_type = other DNA
tttcaacatttgaattttga

SEQ ID NO: 73115 - DNA, 20 bp, synthetic construct
  misc_feature 1..20: note = Description of Artificial Sequence: Synthetic oligonucleotide
  misc_feature 1..20: note = Target: SCN10A; (+) strand; PAM type: YTN; PAM sequence: TTT
  source 1..20: mol_type = other DNA
caacatttgaattttgaggg

SEQ ID NO: 73116 - DNA, 20 bp, synthetic construct
  misc_feature 1..20: note = Description of Artificial Sequence: Synthetic oligonucleotide
  misc_feature 1..20: note = Target: SCN10A; (+) strand; PAM type: YTN; PAM sequence: TTC
  source 1..20: mol_type = other DNA
aacatttgaattttgagggg

SEQ ID NO: 73117 - DNA, 20 bp, synthetic construct
  misc_feature 1..20: note = Description of Artificial Sequence: Synthetic oligonucleotide
  misc_feature 1..20: note = Target: SCN10A; (+) strand; PAM type: YTN; PAM sequence: TTT
  source 1..20: mol_type = other DNA
gaattttgaggggacaaaat

SEQ ID NO: 73118 - DNA, 20 bp, synthetic construct
  misc_feature 1..20: note = Description of Artificial Sequence: Synthetic oligonucleotide
  misc_feature 1..20: note = Target: SCN10A; (+) strand; PAM type: YTN; PAM sequence: TTG
  source 1..20: mol_type = other DNA
aattttgaggggacaaaatt

SEQ ID NO: 73119 - DNA, 20 bp, synthetic construct
  misc_feature 1..20: note = Description of Artificial Sequence: Synthetic oligonucleotide
  misc_feature 1..20: note = Target: SCN10A; (+) strand; PAM type: YTN; PAM sequence: TTT
  source 1..20: mol_type = other DNA
tgaggggacaaaattcactc

SEQ ID NO: 73120 - DNA, 20 bp, synthetic construct
  misc_feature 1..20: note = Description of Artificial Sequence: Synthetic oligonucleotide
  misc_feature 1..20: note = Target: SCN10A; (+) strand; PAM type: YTN; PAM sequence: TTT
  source 1..20: mol_type = other DNA
gaggggacaaaattcactcc

SEQ ID NO: 73121 - DNA, 20 bp, synthetic construct
  misc_feature 1..20: note = Description of Artificial Sequence: Synthetic oligonucleotide
  misc_feature 1..20: note = Target: SCN10A; (+) strand; PAM type: YTN; PAM sequence: TTG
  source 1..20: mol_type = other DNA
aggggacaaaattcactcca

SEQ ID NO: 73122 - DNA, 20 bp, synthetic construct
  misc_feature 1..20: note = Description of Artificial Sequence: Synthetic oligonucleotide
  misc_feature 1..20: note = Target: SCN10A; (+) strand; PAM type: YTN; PAM sequence: TTC
  source 1..20: mol_type = other DNA
actccatagcagcttgtgtg

SEQ ID NO: 73123 - DNA, 20 bp, synthetic construct
  misc_feature 1..20: note = Description of Artificial Sequence: Synthetic oligonucleotide
  misc_feature 1..20: note = Target: SCN10A; (+) strand; PAM type: YTN; PAM sequence: CTC
  source 1..20: mol_type = other DNA
catagcagcttgtgtgacaa

SEQ ID NO: 73124 - DNA, 20 bp, synthetic construct
  misc_feature 1..20: note = Description of Artificial Sequence: Synthetic oligonucleotide
  misc_feature 1..20: note = Target: SCN10A; (+) strand; PAM type: YTN; PAM sequence: CTT
  source 1..20: mol_type = other DNA
gtgtgacaactacccatgcc

SEQ ID NO: 73125 - DNA, 20 bp, synthetic construct
  misc_feature 1..20: note = Description of Artificial Sequence: Synthetic oligonucleotide
  misc_feature 1..20: note = Target: SCN10A; (+) strand; PAM type: YTN; PAM sequence: TTG
  source 1..20: mol_type = other DNA
tgtgacaactacccatgcca

SEQ ID NO: 73126 - DNA, 20 bp, synthetic construct
  misc_feature 1..20: note = Description of Artificial Sequence: Synthetic oligonucleotide
  misc_feature 1..20: note = Target: SCN10A; (+) strand; PAM type: YTN; PAM sequence: CTA
  source 1..20: mol_type = other DNA
cccatgccataaaatggaac

SEQ ID NO: 73127 - DNA, 20 bp, synthetic construct
  misc_feature 1..20: note = Description of Artificial Sequence: Synthetic oligonucleotide
  misc_feature 1..20: note = Target: SCN10A; (+) strand; PAM type: YTN; PAM sequence: CTT
  source 1..20: mol_type = other DNA
caccagctccttcccaatta

SEQ ID NO: 73128 - DNA, 20 bp, synthetic construct
  misc_feature 1..20: note = Description of Artificial Sequence: Synthetic oligonucleotide
  misc_feature 1..20: note = Target: SCN10A; (+) strand; PAM type: YTN; PAM sequence: TTC
  source 1..20: mol_type = other DNA
accagctccttcccaattac

SEQ ID NO: 73129 - DNA, 20 bp, synthetic construct
  misc_feature 1..20: note = Description of Artificial Sequence: Synthetic oligonucleotide
  misc_feature 1..20: note = Target: SCN10A; (+) strand; PAM type: YTN; PAM sequence: CTC
  source 1..20: mol_type = other DNA
cttcccaattacatcctccc

SEQ ID NO: 73130 - DNA, 20 bp, synthetic construct
  misc_feature 1..20: note = Description of Artificial Sequence: Synthetic oligonucleotide
  misc_feature 1..20: note = Target: SCN10A; (+) strand; PAM type: YTN; PAM sequence: CTT
  source 1..20: mol_type = other DNA
cccaattacatcctccctct

SEQ ID NO: 73131 - DNA, 20 bp, synthetic construct
  misc_feature 1..20: note = Description of Artificial Sequence: Synthetic oligonucleotide
  misc_feature 1..20: note = Target: SCN10A; (+) strand; PAM type: YTN; PAM sequence: TTC
  source 1..20: mol_type = other DNA
ccaattacatcctccctctt

SEQ ID NO: 73132 - DNA, 20 bp, synthetic construct
  misc_feature 1..20: note = Description of Artificial Sequence: Synthetic oligonucleotide
  misc_feature 1..20: note = Target: SCN10A; (+) strand; PAM type: YTN; PAM sequence: TTA
  source 1..20: mol_type = other DNA
catcctccctcttctgccct

SEQ ID NO: 73133 - DNA, 20 bp, synthetic construct
  misc_feature 1..20: note = Description of Artificial Sequence: Synthetic oligonucleotide
  misc_feature 1..20: note = Target: SCN10A; (+) strand; PAM type: YTN; PAM sequence: CTC
  source 1..20: mol_type = other DNA
cctcttctgccctggaggcc

SEQ ID NO: 73134 - DNA, 20 bp, synthetic construct
  misc_feature 1..20: note = Description of Artificial Sequence: Synthetic oligonucleotide
  misc_feature 1..20: note = Target: SCN10A; (+) strand; PAM type: YTN; PAM sequence: CTC
  source 1..20: mol_type = other DNA
ttctgccctggaggccacta

SEQ ID NO: 73135 - DNA, 20 bp, synthetic construct
  misc_feature 1..20: note = Description of Artificial Sequence: Synthetic oligonucleotide
  misc_feature 1..20: note = Target: SCN10A; (+) strand; PAM type: YTN; PAM sequence: CTT
  source 1..20: mol_type = other DNA
ctgccctggaggccactatt

SEQ ID NO: 73136 - DNA, 20 bp, synthetic construct
  misc_feature 1..20: note = Description of Artificial Sequence: Synthetic oligonucleotide
  misc_feature 1..20: note = Target: SCN10A; (+) strand; PAM type: YTN; PAM sequence: TTC
  source 1..20: mol_type = other DNA
tgccctggaggccactattc

SEQ ID NO: 73137 - DNA, 20 bp, synthetic construct
  misc_feature 1..20: note = Description of Artificial Sequence: Synthetic oligonucleotide
  misc_feature 1..20: note = Target: SCN10A; (+) strand; PAM type: YTN; PAM sequence: CTG
  source 1..20: mol_type = other DNA
ccctggaggccactattctc

SEQ ID NO: 73138 - DNA, 20 bp, synthetic construct
  misc_feature 1..20: note = Description of Artificial Sequence: Synthetic oligonucleotide
  misc_feature 1..20: note = Target: SCN10A; (+) strand; PAM type: YTN; PAM sequence: CTG
  source 1..20: mol_type = other DNA
gaggccactattctcctaat

SEQ ID NO: 73139 - DNA, 20 bp, synthetic construct
  misc_feature 1..20: note = Description of Artificial Sequence: Synthetic oligonucleotide
  misc_feature 1..20: note = Target: SCN10A; (+) strand; PAM type: YTN; PAM sequence: CTA
  source 1..20: mol_type = other DNA
ttctcctaatttttggtact

SEQ ID NO: 73140 - DNA, 20 bp, synthetic construct
  misc_feature 1..20: note = Description of Artificial Sequence: Synthetic oligonucleotide
  misc_feature 1..20: note = Target: SCN10A; (+) strand; PAM type: YTN; PAM sequence: TTC
  source 1..20: mol_type = other DNA
tcctaatttttggtactttt

SEQ ID NO: 73141 - DNA, 20 bp, synthetic construct
  misc_feature 1..20: note = Description of Artificial Sequence: Synthetic oligonucleotide
  misc_feature 1..20: note = Target: SCN10A; (+) strand; PAM type: YTN; PAM sequence: CTC
  source 1..20: mol_type = other DNA
ctaatttttggtactttttc

SEQ ID NO: 73142 - DNA, 20 bp, synthetic construct
  misc_feature 1..20: note = Description of Artificial Sequence: Synthetic oligonucleotide
  misc_feature 1..20: note = Target: SCN10A; (+) strand; PAM type: YTN; PAM sequence: CTA
  source 1..20: mol_type = other DNA
atttttggtactttttcttg

SEQ ID NO: 73143 - DNA, 20 bp, synthetic construct
  misc_feature 1..20: note = Description of Artificial Sequence: Synthetic oligonucleotide
  misc_feature 1..20: note = Target: SCN10A; (+) strand; PAM type: YTN; PAM sequence: TTT
  source 1..20: mol_type = other DNA
ttggtactttttcttgcctt

SEQ ID NO: 73144 - DNA, 20 bp, synthetic construct
  misc_feature 1..20: note = Description of Artificial Sequence: Synthetic oligonucleotide
  misc_feature 1..20: note = Target: SCN10A; (+) strand; PAM type: YTN; PAM sequence: TTT
  source 1..20: mol_type = other DNA
tggtactttttcttgcctta

SEQ ID NO: 73145 - DNA, 20 bp, synthetic construct
  misc_feature 1..20: note = Description of Artificial Sequence: Synthetic oligonucleotide
  misc_feature 1..20: note = Target: SCN10A; (+) strand; PAM type: YTN; PAM sequence: TTT
  source 1..20: mol_type = other DNA
ggtactttttcttgccttac

SEQ ID NO: 73146 - DNA, 20 bp, synthetic construct
  misc_feature 1..20: note = Description of Artificial Sequence: Synthetic oligonucleotide
  misc_feature 1..20: note = Target: SCN10A; (+) strand; PAM type: YTN; PAM sequence: TTG
  source 1..20: mol_type = other DNA
gtactttttcttgccttact

SEQ ID NO: 73147 - DNA, 20 bp, synthetic construct
  misc_feature 1..20: note = Description of Artificial Sequence: Synthetic oligonucleotide
  misc_feature 1..20: note = Target: SCN10A; (+) strand; PAM type: YTN; PAM sequence: CTT
  source 1..20: mol_type = other DNA
tttcttgccttactttattg

SEQ ID NO: 73148 - DNA, 20 bp, synthetic construct
  misc_feature 1..20: note = Description of Artificial Sequence: Synthetic oligonucleotide
  misc_feature 1..20: note = Target: SCN10A; (+) strand; PAM type: YTN; PAM sequence: TTT
  source 1..20: mol_type = other DNA
ttcttgccttactttattga

SEQ ID NO: 73149 - DNA, 20 bp, synthetic construct
  misc_feature 1..20: note = Description of Artificial Sequence: Synthetic oligonucleotide
  misc_feature 1..20: note = Target: SCN10A; (+) strand; PAM type: YTN; PAM sequence: TTT
  source 1..20: mol_type = other DNA
tcttgccttactttattgat

SEQ ID NO: 73150 - DNA, 20 bp, synthetic construct
  misc_feature 1..20: note = Description of Artificial Sequence: Synthetic oligonucleotide
  misc_feature 1..20: note = Target: SCN10A; (+) strand; PAM type: YTN; PAM sequence: TTT
  source 1..20: mol_type = other DNA
cttgccttactttattgatg

SEQ ID NO: 73151 - DNA, 20 bp, synthetic construct
  misc_feature 1..20: note = Description of Artificial Sequence: Synthetic oligonucleotide
  misc_feature 1..20: note = Target: SCN10A; (+) strand; PAM type: YTN; PAM sequence: TTC
  source 1..20: mol_type = other DNA
ttgccttactttattgatgc

SEQ ID NO: 73152 - DNA, 20 bp, synthetic construct
  misc_feature 1..20: note = Description of Artificial Sequence: Synthetic oligonucleotide
  misc_feature 1..20: note = Target: SCN10A; (+) strand; PAM type: YTN; PAM sequence: CTT
  source 1..20: mol_type = other DNA
gccttactttattgatgctt

SEQ ID NO: 73153 - DNA, 20 bp, synthetic construct
  misc_feature 1..20: note = Description of Artificial Sequence: Synthetic oligonucleotide
  misc_feature 1..20: note = Target: SCN10A; (+) strand; PAM type: YTN; PAM sequence: TTG
  source 1..20: mol_type = other DNA
ccttactttattgatgcttt

SEQ ID NO: 73154 - DNA, 20 bp, synthetic construct
  misc_feature 1..20: note = Description of Artificial Sequence: Synthetic oligonucleotide
  misc_feature 1..20: note = Target: SCN10A; (+) strand; PAM type: YTN; PAM sequence: CTT
  source 1..20: mol_type = other DNA
actttattgatgctttttac

SEQ ID NO: 73155 - DNA, 20 bp, synthetic construct
  misc_feature 1..20: note = Description of Artificial Sequence: Synthetic oligonucleotide
  misc_feature 1..20: note = Target: SCN10A; (+) strand; PAM type: YTN; PAM sequence: TTA
  source 1..20: mol_type = other DNA
ctttattgatgctttttact

SEQ ID NO: 73156 - DNA, 20 bp, synthetic construct
  misc_feature 1..20: note = Description of Artificial Sequence: Synthetic oligonucleotide
  misc_feature 1..20: note = Target: SCN10A; (+) strand; PAM type: YTN; PAM sequence: CTT
  source 1..20: mol_type = other DNA
tattgatgctttttacttca

SEQ ID NO: 73157 - DNA, 20 bp, synthetic construct
  misc_feature 1..20: note = Description of Artificial Sequence: Synthetic oligonucleotide
  misc_feature 1..20: note = Target: SCN10A; (+) strand; PAM type: YTN; PAM sequence: TTT
  source 1..20: mol_type = other DNA
attgatgctttttacttcat

SEQ ID NO: 73158 - DNA, 20 bp, synthetic construct
  misc_feature 1..20: note = Description of Artificial Sequence: Synthetic oligonucleotide
  misc_feature 1..20: note = Target: SCN10A; (+) strand; PAM type: YTN; PAM sequence: TTA
  source 1..20: mol_type = other DNA
ttgatgctttttacttcata

SEQ ID NO: 73159 - DNA, 20 bp, synthetic construct
  misc_feature 1..20: note = Description of Artificial Sequence: Synthetic oligonucleotide
  misc_feature 1..20: note = Target: SCN10A; (+) strand; PAM type: YTN; PAM sequence: TTG
  source 1..20: mol_type = other DNA
atgctttttacttcataagt

SEQ ID NO: 73160 - DNA, 20 bp, synthetic construct
  misc_feature 1..20: note = Description of Artificial Sequence: Synthetic oligonucleotide
  misc_feature 1..20: note = Target: SCN10A; (+) strand; PAM type: YTN; PAM sequence: CTT
  source 1..20: mol_type = other DNA
tttacttcataagtatgcat

SEQ ID NO: 73161 - DNA, 20 bp, synthetic construct
  misc_feature 1..20: note = Description of Artificial Sequence: Synthetic oligonucleotide
  misc_feature 1..20: note = Target: SCN10A; (+) strand; PAM type: YTN; PAM sequence: TTT
  source 1..20: mol_type = other DNA
ttacttcataagtatgcatt

SEQ ID NO: 73162 - DNA, 20 bp, synthetic construct
  misc_feature 1..20: note = Description of Artificial Sequence: Synthetic oligonucleotide
  misc_feature 1..20: note = Target: SCN10A; (+) strand; PAM type: YTN; PAM sequence: TTT
  source 1..20: mol_type = other DNA
tacttcataagtatgcattc

SEQ ID NO: 73163 - DNA, 20 bp, synthetic construct
  misc_feature 1..20: note = Description of Artificial Sequence: Synthetic oligonucleotide
  misc_feature 1..20: note = Target: SCN10A; (+) strand; PAM type: YTN; PAM sequence: TTT
  source 1..20: mol_type = other DNA
acttcataagtatgcattcc

SEQ ID NO: 73164 - DNA, 20 bp, synthetic construct
  misc_feature 1..20: note = Description of Artificial Sequence: Synthetic oligonucleotide
  misc_feature 1..20: note = Target: SCN10A; (+) strand; PAM type: YTN; PAM sequence: TTA
  source 1..20: mol_type = other DNA
cttcataagtatgcattcct

SEQ ID NO: 73165 - DNA, 20 bp, synthetic construct
  misc_feature 1..20: note = Description of Artificial Sequence: Synthetic oligonucleotide
  misc_feature 1..20: note = Target: SCN10A; (+) strand; PAM type: YTN; PAM sequence: CTT
  source 1..20: mol_type = other DNA
cataagtatgcattcctaaa

SEQ ID NO: 73166 - DNA, 20 bp, synthetic construct
  misc_feature 1..20: note = Description of Artificial Sequence: Synthetic oligonucleotide
  misc_feature 1..20: note = Target: SCN10A; (+) strand; PAM type: YTN; PAM sequence: TTC
  source 1..20: mol_type = other DNA
ataagtatgcattcctaaac

SEQ ID NO: 73167 - DNA, 20 bp, synthetic construct
  misc_feature 1..20: note = Description of Artificial Sequence: Synthetic oligonucleotide
  misc_feature 1..20: note = Target: SCN10A; (+) strand; PAM type: YTN; PAM sequence: TTC
  source 1..20: mol_type = other DNA
ctaaacaaaatagtttagtt

SEQ ID NO: 73168 - DNA, 20 bp, synthetic construct
  misc_feature 1..20: note = Description of Artificial Sequence: Synthetic oligonucleotide
  misc_feature 1..20: note = Target: SCN10A; (+) strand; PAM type: YTN; PAM sequence: CTA
  source 1..20: mol_type = other DNA
aacaaaatagtttagttttg

SEQ ID NO: 73169 - DNA, 20 bp, synthetic construct
  misc_feature 1..20: note = Description of Artificial Sequence: Synthetic oligonucleotide
  misc_feature 1..20: note = Target: SCN10A; (+) strand; PAM type: YTN; PAM sequence: TTT
  source 1..20: mol_type = other DNA
agttttgcttgatttcaaac

SEQ ID NO: 73170 - DNA, 20 bp, synthetic construct
  misc_feature 1..20: note = Description of Artificial Sequence: Synthetic oligonucleotide
  misc_feature 1..20: note = Target: SCN10A; (+) strand; PAM type: YTN; PAM sequence: TTA
  source 1..20: mol_type = other DNA
gttttgcttgatttcaaact

SEQ ID NO: 73171 - DNA, 20 bp, synthetic construct
  misc_feature 1..20: note = Description of Artificial Sequence: Synthetic oligonucleotide
  misc_feature 1..20: note = Target: SCN10A; (+) strand; PAM type: YTN; PAM sequence: TTT
  source 1..20: mol_type = other DNA
tgcttgatttcaaactttat

SEQ ID NO: 73172 - DNA, 20 bp, synthetic construct
  misc_feature 1..20: note = Description of Artificial Sequence: Synthetic oligonucleotide
  misc_feature 1..20: note = Target: SCN10A; (+) strand; PAM type: YTN; PAM sequence: TTT
  source 1..20: mol_type = other DNA
gcttgatttcaaactttata

SEQ ID NO: 73173 - DNA, 20 bp, synthetic construct
  misc_feature 1..20: note = Description of Artificial Sequence: Synthetic oligonucleotide
  misc_feature 1..20: note = Target: SCN10A; (+) strand; PAM type: YTN; PAM sequence: TTG
  source 1..20: mol_type = other DNA
cttgatttcaaactttatat

SEQ ID NO: 73174 - DNA, 20 bp, synthetic construct
  misc_feature 1..20: note = Description of Artificial Sequence: Synthetic oligonucleotide
  misc_feature 1..20: note = Target: SCN10A; (+) strand; PAM type: YTN; PAM sequence: CTT
  source 1..20: mol_type = other DNA
gatttcaaactttatataaa

SEQ ID NO: 73175 - DNA, 20 bp, synthetic construct
  misc_feature 1..20: note = Description of Artificial Sequence: Synthetic oligonucleotide
  misc_feature 1..20: note = Target: SCN10A; (+) strand; PAM type: YTN; PAM sequence: TTG
  source 1..20: mol_type = other DNA
atttcaaactttatataaat

SEQ ID NO: 73176 - DNA, 20 bp, synthetic construct
  misc_feature 1..20: note = Description of Artificial Sequence: Synthetic oligonucleotide
  misc_feature 1..20: note = Target: SCN10A; (+) strand; PAM type: YTN; PAM sequence: TTT
  source 1..20: mol_type = other DNA
caaactttatataaatgaac

SEQ ID NO: 73177 - DNA, 20 bp, synthetic construct
  misc_feature 1..20: note = Description of Artificial Sequence: Synthetic oligonucleotide
  misc_feature 1..20: note = Target: SCN10A; (+) strand; PAM type: YTN; PAM sequence: TTC
  source 1..20: mol_type = other DNA
aaactttatataaatgaacc

SEQ ID NO: 73178 - DNA, 20 bp, synthetic construct
  misc_feature 1..20: note = Description of Artificial Sequence: Synthetic oligonucleotide
  misc_feature 1..20: note = Target: SCN10A; (+) strand; PAM type: YTN; PAM sequence: CTT
  source 1..20: mol_type = other DNA
tatataaatgaaccttgttt

SEQ ID NO: 73179 - DNA, 20 bp, synthetic construct
  misc_feature 1..20: note = Description of Artificial Sequence: Synthetic oligonucleotide
  misc_feature 1..20: note = Target: SCN10A; (+) strand; PAM type: YTN; PAM sequence: TTT
  source 1..20: mol_type = other DNA
atataaatgaaccttgttta

SEQ ID NO: 73180 - DNA, 20 bp, synthetic construct
  misc_feature 1..20: note = Description of Artificial Sequence: Synthetic oligonucleotide
  misc_feature 1..20: note = Target: SCN10A; (+) strand; PAM type: YTN; PAM sequence: TTA
  source 1..20: mol_type = other DNA
tataaatgaaccttgtttat

SEQ ID NO: 73181 - DNA, 20 bp, synthetic construct
  misc_feature 1..20: note = Description of Artificial Sequence: Synthetic oligonucleotide
  misc_feature 1..20: note = Target: SCN10A; (+) strand; PAM type: YTN; PAM sequence: CTT
  source 1..20: mol_type = other DNA
gtttatgtaatcctttgcat

SEQ ID NO: 73182 - DNA, 20 bp, synthetic construct
  misc_feature 1..20: note = Description of Artificial Sequence: Synthetic oligonucleotide
  misc_feature 1..20: note = Target: SCN10A; (+) strand; PAM type: YTN; PAM sequence: TTG
  source 1..20: mol_type = other DNA
tttatgtaatcctttgcatt

SEQ ID NO: 73183 - DNA, 20 bp, synthetic construct
  misc_feature 1..20: note = Description of Artificial Sequence: Synthetic oligonucleotide
  misc_feature 1..20: note = Target: SCN10A; (+) strand; PAM type: YTN; PAM sequence: TTT
  source 1..20: mol_type = other DNA
atgtaatcctttgcatttgg

SEQ ID NO: 73184 - DNA, 20 bp, synthetic construct
  misc_feature 1..20: note = Description of Artificial Sequence: Synthetic oligonucleotide
  misc_feature 1..20: note = Target: SCN10A; (+) strand; PAM type: YTN; PAM sequence: TTA
  source 1..20: mol_type = other DNA
tgtaatcctttgcatttggc

SEQ ID NO: 73185 - DNA, 20 bp, synthetic construct
  misc_feature 1..20: note = Description of Artificial Sequence: Synthetic oligonucleotide
  misc_feature 1..20: note = Target: SCN10A; (+) strand; PAM type: YTN; PAM sequence: CTT
  source 1..20: mol_type = other DNA
tgcatttggctttttttgtt

SEQ ID NO: 73186 - DNA, 20 bp, synthetic construct
  misc_feature 1..20: note = Description of Artificial Sequence: Synthetic oligonucleotide
  misc_feature 1..20: note = Target: SCN10A; (+) strand; PAM type: YTN; PAM sequence: TTT
  source 1..20: mol_type = other DNA
gcatttggctttttttgttc

SEQ ID NO: 73187 - DNA, 20 bp, synthetic construct
  misc_feature 1..20: note = Description of Artificial Sequence: Synthetic oligonucleotide
  misc_feature 1..20: note = Target: SCN10A; (+) strand; PAM type: YTN; PAM sequence: TTG
  source 1..20: mol_type = other DNA
catttggctttttttgttca

SEQ ID NO: 73188 - DNA, 20 bp, synthetic construct
  misc_feature 1..20: note = Description of Artificial Sequence: Synthetic oligonucleotide
  misc_feature 1..20: note = Target: SCN10A; (+) strand; PAM type: YTN; PAM sequence: TTT
  source 1..20: mol_type = other DNA
ggctttttttgttcaatatt

SEQ ID NO: 73189 - DNA, 20 bp, synthetic construct
  misc_feature 1..20: note = Description of Artificial Sequence: Synthetic oligonucleotide
  misc_feature 1..20: note = Target: SCN10A; (+) strand; PAM type: YTN; PAM sequence: TTG
  source 1..20: mol_type = other DNA
gctttttttgttcaatatta

SEQ ID NO: 73190 - DNA, 20 bp, synthetic construct
  misc_feature 1..20: note = Description of Artificial Sequence: Synthetic oligonucleotide
  misc_feature 1..20: note = Target: SCN10A; (+) strand; PAM type: YTN; PAM sequence: CTT
  source 1..20: mol_type = other DNA
tttttgttcaatattacttt

SEQ ID NO: 73191 - DNA, 20 bp, synthetic construct
  misc_feature 1..20: note = Description of Artificial Sequence: Synthetic oligonucleotide
  misc_feature 1..20: note = Target: SCN10A; (+) strand; PAM type: YTN; PAM sequence: TTT
  source 1..20: mol_type = other DNA
ttttgttcaatattactttc

SEQ ID NO: 73192 - DNA, 20 bp, synthetic construct
  misc_feature 1..20: note = Description of Artificial Sequence: Synthetic oligonucleotide
  misc_feature 1..20: note = Target: SCN10A; (+) strand; PAM type: YTN; PAM sequence: TTT
  source 1..20: mol_type = other DNA
tttgttcaatattactttct

SEQ ID NO: 73193 - DNA, 20 bp, synthetic construct
  misc_feature 1..20: note = Description of Artificial Sequence: Synthetic oligonucleotide
  misc_feature 1..20: note = Target: SCN10A; (+) strand; PAM type: YTN; PAM sequence: TTT
  source 1..20: mol_type = other DNA
ttgttcaatattactttctt

SEQ ID NO: 73194 - DNA, 20 bp, synthetic construct
  misc_feature 1..20: note = Description of Artificial Sequence: Synthetic oligonucleotide
  misc_feature 1..20: note = Target: SCN10A; (+) strand; PAM type: YTN; PAM sequence: TTT
  source 1..20: mol_type = other DNA
tgttcaatattactttctta

SEQ ID NO: 73195 - DNA, 20 bp, synthetic construct
  misc_feature 1..20: note = Description of Artificial Sequence: Synthetic oligonucleotide
  misc_feature 1..20: note = Target: SCN10A; (+) strand; PAM type: YTN; PAM sequence: TTT
  source 1..20: mol_type = other DNA
gttcaatattactttcttaa

SEQ ID NO: 73196 - DNA, 20 bp, synthetic construct
  misc_feature 1..20: note = Description of Artificial Sequence: Synthetic oligonucleotide
  misc_feature 1..20: note = Target: SCN10A; (+) strand; PAM type: YTN; PAM sequence: TTG
  source 1..20: mol_type = other DNA
ttcaatattactttcttaag

SEQ ID NO: 73197 - DNA, 20 bp, synthetic construct
  misc_feature 1..20: note = Description of Artificial Sequence: Synthetic oligonucleotide
  misc_feature 1..20: note = Target: SCN10A; (+) strand; PAM type: YTN; PAM sequence: TTC
  source 1..20: mol_type = other DNA
aatattactttcttaagact

SEQ ID NO: 73198 - DNA, 20 bp, synthetic construct
  misc_feature 1..20: note = Description of Artificial Sequence: Synthetic oligonucleotide
  misc_feature 1..20: note = Target: SCN10A; (+) strand; PAM type: YTN; PAM sequence: TTA
  source 1..20: mol_type = other DNA
ctttcttaagactcatcctt

SEQ ID NO: 73199 - DNA, 20 bp, synthetic construct
  misc_feature 1..20: note = Description of Artificial Sequence: Synthetic oligonucleotide
  misc_feature 1..20: note = Target: SCN10A; (+) strand; PAM type: YTN; PAM sequence: CTT
  source 1..20: mol_type = other DNA
tcttaagactcatccttatt

SEQ ID NO: 73200 - DNA, 20 bp, synthetic construct
  misc_feature 1..20: note = Description of Artificial Sequence: Synthetic oligonucleotide
  misc_feature 1..20: note = Target: SCN10A; (+) strand; PAM type: YTN; PAM sequence: TTT
  source 1..20: mol_type = other DNA
cttaagactcatccttattg

SEQ ID NO: 73201 - DNA, 20 bp, synthetic construct
  misc_feature 1..20: note = Description of Artificial Sequence: Synthetic oligonucleotide
  misc_feature 1..20: note = Target: SCN10A; (+) strand; PAM type: YTN; PAM sequence: TTC
  source 1..20: mol_type = other DNA
ttaagactcatccttattgt

SEQ ID NO: 73202 - DNA, 20 bp, synthetic construct
  misc_feature 1..20: note = Description of Artificial Sequence: Synthetic oligonucleotide
  misc_feature 1..20: note = Target: SCN10A; (+) strand; PAM type: YTN; PAM sequence: CTT
  source 1..20: mol_type = other DNA
aagactcatccttattgttg

SEQ ID NO: 73203 - DNA, 20 bp, synthetic construct
  misc_feature 1..20: note = Description of Artificial Sequence: Synthetic oligonucleotide
  misc_feature 1..20: note = Target: SCN10A; (+) strand; PAM type: YTN; PAM sequence: TTA
  source 1..20: mol_type = other DNA
agactcatccttattgttgt

SEQ ID NO: 73204 - DNA, 20 bp, synthetic construct
  misc_feature 1..20: note = Description of Artificial Sequence: Synthetic oligonucleotide
  misc_feature 1..20: note = Target: SCN10A; (+) strand; PAM type: YTN; PAM sequence: CTC
  source 1..20: mol_type = other DNA
atccttattgttgtgcagca

SEQ ID NO: 73205 - DNA, 20 bp, synthetic construct
  misc_feature 1..20: note = Description of Artificial Sequence: Synthetic oligonucleotide
  misc_feature 1..20: note = Target: SCN10A; (+) strand; PAM type: YTN; PAM sequence: CTT
  source 1..20: mol_type = other DNA
attgttgtgcagcactaaag

SEQ ID NO: 73206 - DNA, 20 bp, synthetic construct
  misc_feature 1..20: note = Description of Artificial Sequence: Synthetic oligonucleotide
  misc_feature 1..20: note = Target: SCN10A; (+) strand; PAM type: YTN; PAM sequence: TTA
  source 1..20: mol_type = other DNA
ttgttgtgcagcactaaagt

SEQ ID NO: 73207 - DNA, 20 bp, synthetic construct
  misc_feature 1..20: note = Description of Artificial Sequence: Synthetic oligonucleotide
  misc_feature 1..20: note = Target: SCN10A; (+) strand; PAM type: YTN; PAM sequence: TTG
  source 1..20: mol_type = other DNA
ttgtgcagcactaaagttta

SEQ ID NO: 73208 - DNA, 20 bp, synthetic construct
  misc_feature 1..20: note = Description of Artificial Sequence: Synthetic oligonucleotide
  misc_feature 1..20: note = Target: SCN10A; (+) strand; PAM type: YTN; PAM sequence: TTG
  source 1..20: mol_type = other DNA
tgcagcactaaagtttatta

SEQ ID NO: 73209 - DNA, 20 bp, synthetic construct
  misc_feature 1..20: note = Description of Artificial Sequence: Synthetic oligonucleotide
  misc_feature 1..20: note = Target: SCN10A; (+) strand; PAM type: YTN; PAM sequence: CTA
  source 1..20: mol_type = other DNA
aagtttattaatttttattg

SEQ ID NO: 73210 - DNA, 20 bp, synthetic construct
  misc_feature 1..20: note = Description of Artificial Sequence: Synthetic oligonucleotide
  misc_feature 1..20: note = Target: SCN10A; (+) strand; PAM type: YTN; PAM sequence: TTT
  source 1..20: mol_type = other DNA
attaatttttattgctgtaa

SEQ ID NO: 73211 - DNA, 20 bp, synthetic construct
  misc_feature 1..20: note = Description of Artificial Sequence: Synthetic oligonucleotide
  misc_feature 1..20: note = Target: SCN10A; (+) strand; PAM type: YTN; PAM sequence: TTA
  source 1..20: mol_type = other DNA
ttaatttttattgctgtaag

SEQ ID NO: 73212 - DNA, 20 bp, synthetic construct
  misc_feature 1..20: note = Description of Artificial Sequence: Synthetic oligonucleotide
  misc_feature 1..20: note = Target: SCN10A; (+) strand; PAM type: YTN; PAM sequence: TTA
  source 1..20: mol_type = other DNA
atttttattgctgtaagttt

SEQ ID NO: 73213 - DNA, 20 bp, synthetic construct
  misc_feature 1..20: note = Description of Artificial Sequence: Synthetic oligonucleotide
  misc_feature 1..20: note = Target: SCN10A; (+) strand; PAM type: YTN; PAM sequence: TTT
  source 1..20: mol_type = other DNA
ttattgctgtaagttttctc

SEQ ID NO: 73214 - DNA, 20 bp, synthetic construct
  misc_feature 1..20: note = Description of Artificial Sequence: Synthetic oligonucleotide
  misc_feature 1..20: note = Target: SCN10A; (+) strand; PAM type: YTN; PAM sequence: TTT
  source 1..20: mol_type = other DNA
tattgctgtaagttttctca

SEQ ID NO: 73215 - DNA, 20 bp, synthetic construct
  misc_feature 1..20: note = Description of Artificial Sequence: Synthetic oligonucleotide
  misc_feature 1..20: note = Target: SCN10A; (+) strand; PAM type: YTN; PAM sequence: TTT
  source 1..20: mol_type = other DNA
attgctgtaagttttctcat

SEQ ID NO: 73216 - DNA, 20 bp, synthetic construct
  misc_feature 1..20: note = Description of Artificial Sequence: Synthetic oligonucleotide
  misc_feature 1..20: note = Target: SCN10A; (+) strand; PAM type: YTN; PAM sequence: TTA
  source 1..20: mol_type = other DNA
ttgctgtaagttttctcatt

SEQ ID NO: 73217 - DNA, 20 bp, synthetic construct
  misc_feature 1..20: note = Description of Artificial Sequence: Synthetic oligonucleotide
  misc_feature 1..20: note = Target: SCN10A; (+) strand; PAM type: YTN; PAM sequence: TTG
  source 1..20: mol_type = other DNA
ctgtaagttttctcatttta

SEQ ID NO: 73218 - DNA, 20 bp, synthetic construct
  misc_feature 1..20: note = Description of Artificial Sequence: Synthetic oligonucleotide
  misc_feature 1..20: note = Target: SCN10A; (+) strand; PAM type: YTN; PAM sequence: CTG
  source 1..20: mol_type = other DNA
taagttttctcattttagaa

SEQ ID NO: 73219 - DNA, 20 bp, synthetic construct
  misc_feature 1..20: note = Description of Artificial Sequence: Synthetic oligonucleotide
  misc_feature 1..20: note = Target: SCN10A; (+) strand; PAM type: YTN; PAM sequence: TTT
  source 1..20: mol_type = other DNA
tctcattttagaatataaca

SEQ ID NO: 73220 - DNA, 20 bp, synthetic construct
  misc_feature 1..20: note = Description of Artificial Sequence: Synthetic oligonucleotide
  misc_feature 1..20: note = Target: SCN10A; (+) strand; PAM type: YTN; PAM sequence: TTT
  source 1..20: mol_type = other DNA
ctcattttagaatataacag

SEQ ID NO: 73221 - DNA, 20 bp, synthetic construct
  misc_feature 1..20: note = Description of Artificial Sequence: Synthetic oligonucleotide
  misc_feature 1..20: note = Target: SCN10A; (+) strand; PAM type: YTN; PAM sequence: TTC
  source 1..20: mol_type = other DNA
tcattttagaatataacaga

SEQ ID NO: 73222 - DNA, 20 bp, synthetic construct
  misc_feature 1..20: note = Description of Artificial Sequence: Synthetic oligonucleotide
  misc_feature 1..20: note = Target: SCN10A; (+) strand; PAM type: YTN; PAM sequence: CTC
  source 1..20: mol_type = other DNA
attttagaatataacagaaa

SEQ ID NO: 73223 - DNA, 20 bp, synthetic construct
  misc_feature 1..20: note = Description of Artificial Sequence: Synthetic oligonucleotide
  misc_feature 1..20: note = Target: SCN10A; (+) strand; PAM type: YTN; PAM sequence: TTT
  source 1..20: mol_type = other DNA
tagaatataacagaaatagt

SEQ ID NO: 73224 - DNA, 20 bp, synthetic construct
  misc_feature 1..20: note = Description of Artificial Sequence: Synthetic oligonucleotide
  misc_feature 1..20: note = Target: SCN10A; (+) strand; PAM type: YTN; PAM sequence: TTT
  source 1..20: mol_type = other DNA
agaatataacagaaatagtt

SEQ ID NO: 73225 - DNA, 20 bp, synthetic construct
  misc_feature 1..20: note = Description of Artificial Sequence: Synthetic oligonucleotide
  misc_feature 1..20: note = Target: SCN10A; (+) strand; PAM type: YTN; PAM sequence: TTA
  source 1..20: mol_type = other DNA
gaatataacagaaatagtta

SEQ ID NO: 73226 - DNA, 20 bp, synthetic construct
  misc_feature 1..20: note = Description of Artificial Sequence: Synthetic oligonucleotide
  misc_feature 1..20: note = Target: SCN10A; (+) strand; PAM type: YTN; PAM sequence: TTA
  source 1..20: mol_type = other DNA
atgtactcaaagtttatgga

SEQ ID NO: 73227 - DNA, 20 bp, synthetic construct
  misc_feature 1..20: note = Description of Artificial Sequence: Synthetic oligonucleotide
  misc_feature 1..20: note = Target: SCN10A; (+) strand; PAM type: YTN; PAM sequence: CTC
  source 1..20: mol_type = other DNA
aaagtttatggacatttgag

SEQ ID NO: 73228 - DNA, 20 bp, synthetic construct
  misc_feature 1..20: note = Description of Artificial Sequence: Synthetic oligonucleotide
  misc_feature 1..20: note = Target: SCN10A; (+) strand; PAM type: YTN; PAM sequence: TTT
  source 1..20: mol_type = other DNA
atggacatttgagtggtttc

SEQ ID NO: 73229 - DNA, 20 bp, synthetic construct
  misc_feature 1..20: note = Description of Artificial Sequence: Synthetic oligonucleotide
  misc_feature 1..20: note = Target: SCN10A; (+) strand; PAM type: YTN; PAM sequence: TTA
  source 1..20: mol_type = other DNA
tggacatttgagtggtttcc

SEQ ID NO: 73230 - DNA, 20 bp, synthetic construct
  misc_feature 1..20: note = Description of Artificial Sequence: Synthetic oligonucleotide
  misc_feature 1..20: note = Target: SCN10A; (+) strand; PAM type: YTN; PAM sequence: TTT
  source 1..20: mol_type = other DNA
gagtggtttccggtttgggg

SEQ ID NO: 73231 - DNA, 20 bp, synthetic construct
  misc_feature 1..20: note = Description of Artificial Sequence: Synthetic oligonucleotide
  misc_feature 1..20: note = Target: SCN10A; (+) strand; PAM type: YTN; PAM sequence: TTG
  source 1..20: mol_type = other DNA
agtggtttccggtttggggt

SEQ ID NO: 73232 - DNA, 20 bp, synthetic construct
  misc_feature 1..20: note = Description of Artificial Sequence: Synthetic oligonucleotide
  misc_feature 1..20: note = Target: SCN10A; (+) strand; PAM type: YTN; PAM sequence: TTT
  source 1..20: mol_type = other DNA
ccggtttggggtttttatgg

SEQ ID NO: 73233 - DNA, 20 bp, synthetic construct
  misc_feature 1..20: note = Description of Artificial Sequence: Synthetic oligonucleotide
  misc_feature 1..20: note = Target: SCN10A; (+) strand; PAM type: YTN; PAM sequence: TTC
  source 1..20: mol_type = other DNA
cggtttggggtttttatggg

SEQ ID NO: 73234 - DNA, 20 bp, synthetic construct
  misc_feature 1..20: note = Description of Artificial Sequence: Synthetic oligonucleotide
  misc_feature 1..20: note = Target: SCN10A; (+) strand; PAM type: YTN; PAM sequence: TTT
  source 1..20: mol_type = other DNA
ggggtttttatgggcaaatg

SEQ ID NO: 73235 - DNA, 20 bp, synthetic construct
  misc_feature 1..20: note = Description of Artificial Sequence: Synthetic oligonucleotide
  misc_feature 1..20: note = Target: SCN10A; (+) strand; PAM type: YTN; PAM sequence: TTG
  source 1..20: mol_type = other DNA
gggtttttatgggcaaatgt

SEQ ID NO: 73236 - DNA, 20 bp, synthetic construct
  misc_feature 1..20: note = Description of Artificial Sequence: Synthetic oligonucleotide
  misc_feature 1..20: note = Target: SCN10A; (+) strand; PAM type: YTN; PAM sequence: TTT
  source 1..20: mol_type = other DNA
ttatgggcaaatgttcataa

SEQ ID NO: 73237 - DNA, 20 bp, synthetic construct
  misc_feature 1..20: note = Description of Artificial Sequence: Synthetic oligonucleotide
  misc_feature 1..20: note = Target: SCN10A; (+) strand; PAM type: YTN; PAM sequence: TTT
  source 1..20: mol_type = other DNA
tatgggcaaatgttcataaa

SEQ ID NO: 73238 - DNA, 20 bp, synthetic construct
  misc_feature 1..20: note = Description of Artificial Sequence: Synthetic oligonucleotide
  misc_feature 1..20: note = Target: SCN10A; (+) strand; PAM type: YTN; PAM sequence: TTT
  source 1..20: mol_type = other DNA
atgggcaaatgttcataaac

SEQ ID NO: 73239 - DNA, 20 bp, synthetic construct
  misc_feature 1..20: note = Description of Artificial Sequence: Synthetic oligonucleotide
  misc_feature 1..20: note = Target: SCN10A; (+) strand; PAM type: YTN; PAM sequence: TTA
  source 1..20: mol_type = other DNA
tgggcaaatgttcataaact

SEQ ID NO: 73240 - DNA, 20 bp, synthetic construct
  misc_feature 1..20: note = Description of Artificial Sequence: Synthetic oligonucleotide
  misc_feature 1..20: note = Target: SCN10A; (+) strand; PAM type: YTN; PAM sequence: TTC
  source 1..20: mol_type = other DNA
ataaactttcttgtagctgt

SEQ ID NO: 73241 - DNA, 20 bp, synthetic construct
  misc_feature 1..20: note = Description of Artificial Sequence: Synthetic oligonucleotide
  misc_feature 1..20: note = Target: SCN10A; (+) strand; PAM type: YTN; PAM sequence: CTT
  source 1..20: mol_type = other DNA
tcttgtagctgtaatctggt

SEQ ID NO: 73242 - DNA, 20 bp, synthetic construct
  misc_feature 1..20: note = Description of Artificial Sequence: Synthetic oligonucleotide
  misc_feature 1..20: note = Target: SCN10A; (+) strand; PAM type: YTN; PAM sequence: TTT
  source 1..20: mol_type = other DNA
cttgtagctgtaatctggtg

SEQ ID NO: 73243 - DNA, 20 bp, synthetic construct
  misc_feature 1..20: note = Description of Artificial Sequence: Synthetic oligonucleotide
  misc_feature 1..20: note = Target: SCN10A; (+) strand; PAM type: YTN; PAM sequence: TTC
  source 1..20: mol_type = other DNA
ttgtagctgtaatctggtgt

SEQ ID NO: 73244 - DNA, 20 bp, synthetic construct
  misc_feature 1..20: note = Description of Artificial Sequence: Synthetic oligonucleotide
  misc_feature 1..20: note = Target: SCN10A; (+) strand; PAM type: YTN; PAM sequence: CTT
  source 1..20: mol_type = other DNA
gtagctgtaatctggtgtcc

SEQ ID NO: 73245 - DNA, 20 bp, synthetic construct
  misc_feature 1..20: note = Description of Artificial Sequence: Synthetic oligonucleotide
  misc_feature 1..20: note = Target: SCN10A; (+) strand; PAM type: YTN; PAM sequence: TTG
  source 1..20: mol_type = other DNA
tagctgtaatctggtgtcca

SEQ ID NO: 73246 - DNA, 20 bp, synthetic construct
  misc_feature 1..20: note = Description of Artificial Sequence: Synthetic oligonucleotide
  misc_feature 1..20: note = Target: SCN10A; (+) strand; PAM type: YTN; PAM sequence: CTG
  source 1..20: mol_type = other DNA
taatctggtgtccacaagta

SEQ ID NO: 73247 - DNA, 20 bp, synthetic construct
  misc_feature 1..20: note = Description of Artificial Sequence: Synthetic oligonucleotide
  misc_feature 1..20: note = Target: SCN10A; (+) strand; PAM type: YTN; PAM sequence: CTG
  source 1..20: mol_type = other DNA
gtgtccacaagtacatattt

SEQ ID NO: 73248 - DNA, 20 bp, synthetic construct
  misc_feature 1..20: note = Description of Artificial Sequence: Synthetic oligonucleotide
  misc_feature 1..20: note = Target: SCN10A; (+) strand; PAM type: YTN; PAM sequence: TTT
  source 1..20: mol_type = other DNA
ctgttaaacataggtaccta

SEQ ID NO: 73249 - DNA, 20 bp, synthetic construct
  misc_feature 1..20: note = Description of Artificial Sequence: Synthetic oligonucleotide
  misc_feature 1..20: note = Target: SCN10A; (+) strand; PAM type: YTN; PAM sequence: TTC
  source 1..20: mol_type = other DNA
tgttaaacataggtacctaa

SEQ ID NO: 73250 - DNA, 20 bp, synthetic construct
  misc_feature 1..20: note = Description of Artificial Sequence: Synthetic oligonucleotide
  misc_feature 1..20: note = Target: SCN10A; (+) strand; PAM type: YTN; PAM sequence: CTG
  source 1..20: mol_type = other DNA
ttaaacataggtacctaagg

SEQ ID NO: 73251 - DNA, 20 bp, synthetic construct
  misc_feature 1..20: note = Description of Artificial Sequence: Synthetic oligonucleotide
  misc_feature 1..20: note = Target: SCN10A; (+) strand; PAM type: YTN; PAM sequence: TTA
  source 1..20: mol_type = other DNA
aacataggtacctaagggtg

SEQ ID NO: 73252 - DNA, 20 bp, synthetic construct
  misc_feature 1..20: note = Description of Artificial Sequence: Synthetic oligonucleotide
  misc_feature 1..20: note = Target: SCN10A; (+) strand; PAM type: YTN; PAM sequence: CTA
  source 1..20: mol_type = other DNA
agggtgtaatagaagaatac

SEQ ID NO: 73253 - DNA, 20 bp, synthetic construct
  misc_feature 1..20: note = Description of Artificial Sequence: Synthetic oligonucleotide
  misc_feature 1..20: note = Target: SCN10A; (+) strand; PAM type: YTN; PAM sequence: CTT
  source 1..20: mol_type = other DNA
acacctttactagataatac

SEQ ID NO: 73254 - DNA, 20 bp, synthetic construct
  misc_feature 1..20: note = Description of Artificial Sequence: Synthetic oligonucleotide
  misc_feature 1..20: note = Target: SCN10A; (+) strand; PAM type: YTN; PAM sequence: TTA
  source 1..20: mol_type = other DNA
cacctttactagataatacc

SEQ ID NO: 73255 - DNA, 20 bp, synthetic construct
  misc_feature 1..20: note = Description of Artificial Sequence: Synthetic oligonucleotide
  misc_feature 1..20: note = Target: SCN10A; (+) strand; PAM type: YTN; PAM sequence: CTT
  source 1..20: mol_type = other DNA
tactagataataccccttgc

SEQ ID NO: 73256 - DNA, 20 bp, synthetic construct
  misc_feature 1..20: note = Description of Artificial Sequence: Synthetic oligonucleotide
  misc_feature 1..20: note = Target: SCN10A; (+) strand; PAM type: YTN; PAM sequence: TTT
  source 1..20: mol_type = other DNA
actagataataccccttgct

SEQ ID NO: 73257 - DNA, 20 bp, synthetic construct
  misc_feature 1..20: note = Description of Artificial Sequence: Synthetic oligonucleotide
  misc_feature 1..20: note = Target: SCN10A; (+) strand; PAM type: YTN; PAM sequence: TTA
  source 1..20: mol_type = other DNA
ctagataataccccttgctt

SEQ ID NO: 73258 - DNA, 20 bp, synthetic construct
  misc_feature 1..20: note = Description of Artificial Sequence: Synthetic oligonucleotide
  misc_feature 1..20: note = Target: SCN10A; (+) strand; PAM type: YTN; PAM sequence: CTA
  source 1..20: mol_type = other DNA
gataataccccttgctttcc

SEQ ID NO: 73259 - DNA, 20 bp, synthetic construct
  misc_feature 1..20: note = Description of Artificial Sequence: Synthetic oligonucleotide
  misc_feature 1..20: note = Target: SCN10A; (+) strand; PAM type: YTN; PAM sequence: CTT
  source 1..20: mol_type = other DNA
gctttccaaagaggttgtcc

SEQ ID NO: 73260 - DNA, 20 bp, synthetic construct
  misc_feature 1..20: note = Description of Artificial Sequence: Synthetic oligonucleotide
  misc_feature 1..20: note = Target: SCN10A; (+) strand; PAM type: YTN; PAM sequence: TTG
  source 1..20: mol_type = other DNA
ctttccaaagaggttgtcca

SEQ ID NO: 73261 - DNA, 20 bp, synthetic construct
  misc_feature 1..20: note = Description of Artificial Sequence: Synthetic oligonucleotide
  misc_feature 1..20: note = Target: SCN10A; (+) strand; PAM type: YTN; PAM sequence: CTT
  source 1..20: mol_type = other DNA
tccaaagaggttgtccaaat

SEQ ID NO: 73262 - DNA, 20 bp, synthetic construct
  misc_feature 1..20: note = Description of Artificial Sequence: Synthetic oligonucleotide
  misc_feature 1..20: note = Target: SCN10A; (+) strand; PAM type: YTN; PAM sequence: TTT
  source 1..20: mol_type = other DNA
ccaaagaggttgtccaaatt

SEQ ID NO: 73263 - DNA, 20 bp, synthetic construct
  misc_feature 1..20: note = Description of Artificial Sequence: Synthetic oligonucleotide
  misc_feature 1..20: note = Target: SCN10A; (+) strand; PAM type: YTN; PAM sequence: TTC
  source 1..20: mol_type = other DNA
caaagaggttgtccaaattt

SEQ ID NO: 73264 - DNA, 20 bp, synthetic construct
  misc_feature 1..20: note = Description of Artificial Sequence: Synthetic oligonucleotide
  misc_feature 1..20: note = Target: SCN10A; (+) strand; PAM type: YTN; PAM sequence: TTG
  source 1..20: mol_type = other DNA
tccaaatttacactcccacc

SEQ ID NO: 73265 - DNA, 20 bp, synthetic construct
  misc_feature 1..20: note = Description of Artificial Sequence: Synthetic oligonucleotide
  misc_feature 1..20: note = Target: SCN10A; (+) strand; PAM type: YTN; PAM sequence: TTT
  source 1..20: mol_type = other DNA
acactcccaccagcagtgtg

SEQ ID NO: 73266 - DNA, 20 bp, synthetic construct
  misc_feature 1..20: note = Description of Artificial Sequence: Synthetic oligonucleotide
  misc_feature 1..20: note = Target: SCN10A; (+) strand; PAM type: YTN; PAM sequence: TTA
  source 1..20: mol_type = other DNA
cactcccaccagcagtgtgt

SEQ ID NO: 73267 - DNA, 20 bp, synthetic construct
  misc_feature 1..20: note = Description of Artificial Sequence: Synthetic oligonucleotide
  misc_feature 1..20: note = Target: SCN10A; (+) strand; PAM type: YTN; PAM sequence: CTC
  source 1..20: mol_type = other DNA
ccaccagcagtgtgtgagtt

SEQ ID NO: 73268 - DNA, 20 bp, synthetic construct
  misc_feature 1..20: note = Description of Artificial Sequence: Synthetic oligonucleotide
  misc_feature 1..20: note = Target: SCN10A; (+) strand; PAM type: YTN; PAM sequence: TTT
  source 1..20: mol_type = other DNA
ctgttgctccatgtcattcc

SEQ ID NO: 73269 - DNA, 20 bp, synthetic construct
  misc_feature 1..20: note = Description of Artificial Sequence: Synthetic oligonucleotide
  misc_feature 1..20: note = Target: SCN10A; (+) strand; PAM type: YTN; PAM sequence: TTC
  source 1..20: mol_type = other DNA
tgttgctccatgtcattccc

SEQ ID NO: 73270 - DNA, 20 bp, synthetic construct
  misc_feature 1..20: note = Description of Artificial Sequence: Synthetic oligonucleotide
  misc_feature 1..20: note = Target: SCN10A; (+) strand; PAM type: YTN; PAM sequence: CTG
  source 1..20: mol_type = other DNA
ttgctccatgtcattcccaa

SEQ ID NO: 73271 - DNA, 20 bp, synthetic construct
  misc_feature 1..20: note = Description of Artificial Sequence: Synthetic oligonucleotide
  misc_feature 1..20: note = Target: SCN10A; (+) strand; PAM type: YTN; PAM sequence: TTG
  source 1..20: mol_type = other DNA
ctccatgtcattcccaatac

SEQ ID NO: 73272 - DNA, 20 bp, synthetic construct
  misc_feature 1..20: note = Description of Artificial Sequence: Synthetic oligonucleotide
  misc_feature 1..20: note = Target: SCN10A; (+) strand; PAM type: YTN; PAM sequence: CTC
  source 1..20: mol_type = other DNA
catgtcattcccaatacttg

SEQ ID NO: 73273 - DNA, 20 bp, synthetic construct
  misc_feature 1..20: note = Description of Artificial Sequence: Synthetic oligonucleotide
  misc_feature 1..20: note = Target: SCN10A; (+) strand; PAM type: YTN; PAM sequence: TTC
  source 1..20: mol_type = other DNA
ccaatacttggtattgtgac

SEQ ID NO: 73274 - DNA, 20 bp, synthetic construct
  misc_feature 1..20: note = Description of Artificial Sequence: Synthetic oligonucleotide
  misc_feature 1..20: note = Target: SCN10A; (+) strand; PAM type: YTN; PAM sequence: CTT
  source 1..20: mol_type = other DNA
ggtattgtgacactttaaaa

SEQ ID NO: 73275 - DNA, 20 bp, synthetic construct
  misc_feature 1..20: note = Description of Artificial Sequence: Synthetic oligonucleotide
  misc_feature 1..20: note = Target: SCN10A; (+) strand; PAM type: YTN; PAM sequence: TTG
  source 1..20: mol_type = other DNA
gtattgtgacactttaaaaa

SEQ ID NO: 73276 - DNA, 20 bp, synthetic construct
  misc_feature 1..20: note = Description of Artificial Sequence: Synthetic oligonucleotide
  misc_feature 1..20: note = Target: SCN10A; (+) strand; PAM type: YTN; PAM sequence: TTG
  source 1..20: mol_type = other DNA
tgacactttaaaaaatttcc

SEQ ID NO: 73277 - DNA, 20 bp, synthetic construct
  misc_feature 1..20: note = Description of Artificial Sequence: Synthetic oligonucleotide
  misc_feature 1..20: note = Target: SCN10A; (+) strand; PAM type: YTN; PAM sequence: CTT
  source 1..20: mol_type = other DNA
taaaaaatttcccttctatg

SEQ ID NO: 73278 - DNA, 20 bp, synthetic construct
  misc_feature 1..20: note = Description of Artificial Sequence: Synthetic oligonucleotide
  misc_feature 1..20: note = Target: SCN10A; (+) strand; PAM type: YTN; PAM sequence: TTT
  source 1..20: mol_type = other DNA
aaaaaatttcccttctatga

SEQ ID NO: 73279 - DNA, 20 bp, synthetic construct
  misc_feature 1..20: note = Description of Artificial Sequence: Synthetic oligonucleotide
  misc_feature 1..20: note = Target: SCN10A; (+) strand; PAM type: YTN; PAM sequence: TTA
  source 1..20: mol_type = other DNA
aaaaatttcccttctatgat

SEQ ID NO: 73280 - DNA, 20 bp, synthetic construct
  misc_feature 1..20: note = Description of Artificial Sequence: Synthetic oligonucleotide
  misc_feature 1..20: note = Target: SCN10A; (+) strand; PAM type: YTN; PAM sequence: TTT
  source 1..20: mol_type = other DNA
cccttctatgatgaacatgt

SEQ ID NO: 73281 - DNA, 20 bp, synthetic construct
  misc_feature 1..20: note = Description of Artificial Sequence: Synthetic oligonucleotide
  misc_feature 1..20: note = Target: SCN10A; (+) strand; PAM type: YTN; PAM sequence: TTC
  source 1..20: mol_type = other DNA
ccttctatgatgaacatgta

SEQ ID NO: 73282 - DNA, 20 bp, synthetic construct
  misc_feature 1..20: note = Description of Artificial Sequence: Synthetic oligonucleotide
  misc_feature 1..20: note = Target: SCN10A; (+) strand; PAM type: YTN; PAM sequence: CTT
  source 1..20: mol_type = other DNA
ctatgatgaacatgtaataa

SEQ ID NO: 73283 - DNA, 20 bp, synthetic construct
  misc_feature 1..20: note = Description of Artificial Sequence: Synthetic oligonucleotide
  misc_feature 1..20: note = Target: SCN10A; (+) strand; PAM type: YTN; PAM sequence: TTC
  source 1..20: mol_type = other DNA
tatgatgaacatgtaataaa

SEQ ID NO: 73284 - DNA, 20 bp, synthetic construct
  misc_feature 1..20: note = Description of Artificial Sequence: Synthetic oligonucleotide
  misc_feature 1..20: note = Target: SCN10A; (+) strand; PAM type: YTN; PAM sequence: CTA
  source 1..20: mol_type = other DNA
tgatgaacatgtaataaaat

SEQ ID NO: 73285 - DNA, 20 bp, synthetic construct
  misc_feature 1..20: note = Description of Artificial Sequence: Synthetic oligonucleotide
  misc_feature 1..20: note = Target: SCN10A; (+) strand; PAM type: YTN; PAM sequence: CTC
  source 1..20: mol_type = other DNA
agtgtgattttaatttgcaa

SEQ ID NO: 73286 - DNA, 20 bp, synthetic construct
  misc_feature 1..20: note = Description of Artificial Sequence: Synthetic oligonucleotide
  misc_feature 1..20: note = Target: SCN10A; (+) strand; PAM type: YTN; PAM sequence: TTT
  source 1..20: mol_type = other DNA
taatttgcaactctttgatt

SEQ ID NO: 73287 - DNA, 20 bp, synthetic construct
  misc_feature 1..20: note = Description of Artificial Sequence: Synthetic oligonucleotide
  misc_feature 1..20: note = Target: SCN10A; (+) strand; PAM type: YTN; PAM sequence: TTT
  source 1..20: mol_type = other DNA
aatttgcaactctttgattt

SEQ ID NO: 73288 - DNA, 20 bp, synthetic construct
  misc_feature 1..20: note = Description of Artificial Sequence: Synthetic oligonucleotide
  misc_feature 1..20: note = Target: SCN10A; (+) strand; PAM type: YTN; PAM sequence: TTA
  source 1..20: mol_type = other DNA
atttgcaactctttgattta

SEQ ID NO: 73289 - DNA, 20 bp, synthetic construct
  misc_feature 1..20: note = Description of Artificial Sequence: Synthetic oligonucleotide
  misc_feature 1..20: note = Target: SCN10A; (+) strand; PAM type: YTN; PAM sequence: TTT
  source 1..20: mol_type = other DNA
gcaactctttgatttaaaaa

SEQ ID NO: 73290 - DNA, 20 bp, synthetic construct
  misc_feature 1..20: note = Description of Artificial Sequence: Synthetic oligonucleotide
  misc_feature 1..20: note = Target: SCN10A; (+) strand; PAM type: YTN; PAM sequence: TTG
  source 1..20: mol_type = other DNA
caactctttgatttaaaaaa

SEQ ID NO: 73291 - DNA, 20 bp, synthetic construct
  misc_feature 1..20: note = Description of Artificial Sequence: Synthetic oligonucleotide
  misc_feature 1..20: note = Target: SCN10A; (+) strand; PAM type: YTN; PAM sequence: CTC
  source 1..20: mol_type = other DNA
tttgatttaaaaaaaggtta

SEQ ID NO: 73292 - DNA, 20 bp, synthetic construct
  misc_feature 1..20: note = Description of Artificial Sequence: Synthetic oligonucleotide
  misc_feature 1..20: note = Target: SCN10A; (+) strand; PAM type: YTN; PAM sequence: CTT
  source 1..20: mol_type = other DNA
tgatttaaaaaaaggttaag

SEQ ID NO: 73293 - DNA, 20 bp, synthetic construct
  misc_feature 1..20: note = Description of Artificial Sequence: Synthetic oligonucleotide
  misc_feature 1..20: note = Target: SCN10A; (+) strand; PAM type: YTN; PAM sequence: TTT
  source 1..20: mol_type = other DNA
gatttaaaaaaaggttaaga

SEQ ID NO: 73294 - DNA, 20 bp, synthetic construct
  misc_feature 1..20: note = Description of Artificial Sequence: Synthetic oligonucleotide
  misc_feature 1..20: note = Target: SCN10A; (+) strand; PAM type: YTN; PAM sequence: TTG
  source 1..20: mol_type = other DNA
atttaaaaaaaggttaagaa

SEQ ID NO: 73295 - DNA, 20 bp, synthetic construct
  misc_feature 1..20: note = Description of Artificial Sequence: Synthetic oligonucleotide
  misc_feature 1..20: note = Target: SCN10A; (+) strand; PAM type: YTN; PAM sequence: TTT
  source 1..20: mol_type = other DNA
aaaaaaaggttaagaatact

SEQ ID NO: 73296 - DNA, 20 bp, synthetic construct
  misc_feature 1..20: note = Description of Artificial Sequence: Synthetic oligonucleotide
  misc_feature 1..20: note = Target: SCN10A; (+) strand; PAM type: YTN; PAM sequence: TTA
  source 1..20: mol_type = other DNA
aaaaaaggttaagaatactt

SEQ ID NO: 73297 - DNA, 20 bp, synthetic construct
  misc_feature 1..20: note = Description of Artificial Sequence: Synthetic oligonucleotide
  misc_feature 1..20: note = Target: SCN10A; (+) strand; PAM type: YTN; PAM sequence: TTA
  source 1..20: mol_type = other DNA
agaatactttcatatgttta

SEQ ID NO: 73298 - DNA, 20 bp, synthetic construct
  misc_feature 1..20: note = Description of Artificial Sequence: Synthetic oligonucleotide
  misc_feature 1..20: note = Target: SCN10A; (+) strand; PAM type: YTN; PAM sequence: CTT
  source 1..20: mol_type = other DNA
tcatatgtttatggccattt

SEQ ID NO: 73299 - DNA, 20 bp, synthetic construct
  misc_feature 1..20: note = Description of Artificial Sequence: Synthetic oligonucleotide
  misc_feature 1..20: note = Target: SCN10A; (+) strand; PAM type: YTN; PAM sequence: TTT
  source 1..20: mol_type = other DNA
catatgtttatggccatttg

SEQ ID NO: 73300 - DNA, 20 bp, synthetic construct
  misc_feature 1..20: note = Description of Artificial Sequence: Synthetic oligonucleotide
  misc_feature 1..20: note = Target: SCN10A; (+) strand; PAM type: YTN; PAM sequence: TTC
  source 1..20: mol_type = other DNA
atatgtttatggccatttgg

SEQ ID NO: 73301 - DNA, 20 bp, synthetic construct
  misc_feature 1..20: note = Description of Artificial Sequence: Synthetic oligonucleotide
  misc_feature 1..20: note = Target: SCN10A; (+) strand; PAM type: YTN; PAM sequence: TTT
  source 1..20: mol_type = other DNA
atggccatttggatttccac

SEQ ID NO: 73302 - DNA, 20 bp, synthetic construct
  misc_feature 1..20: note = Description of Artificial Sequence: Synthetic oligonucleotide
  misc_feature 1..20: note = Target: SCN10A; (+) strand; PAM type: YTN; PAM sequence: TTA
  source 1..20: mol_type = other DNA
tggccatttggatttccact

SEQ ID NO: 73303 - DNA, 20 bp, synthetic construct
  misc_feature 1..20: note = Description of Artificial Sequence: Synthetic oligonucleotide
  misc_feature 1..20: note = Target: SCN10A; (+) strand; PAM type: YTN; PAM sequence: TTT
  source 1..20: mol_type = other DNA
ggatttccacttttgtaaag

SEQ ID NO: 73304 - DNA, 20 bp, synthetic construct
  misc_feature 1..20: note = Description of Artificial Sequence: Synthetic oligonucleotide
  misc_feature 1..20: note = Target: SCN10A; (+) strand; PAM type: YTN; PAM sequence: TTG
  source 1..20: mol_type = other DNA
gatttccacttttgtaaagt

SEQ ID NO: 73305 - DNA, 20 bp, synthetic construct
  misc_feature 1..20: note = Description of Artificial Sequence: Synthetic oligonucleotide
  misc_feature 1..20: note = Target: SCN10A; (+) strand; PAM type: YTN; PAM sequence: TTT
  source 1..20: mol_type = other DNA
ccacttttgtaaagtgccta

SEQ ID NO: 73306 - DNA, 20 bp, synthetic construct
  misc_feature 1..20: note = Description of Artificial Sequence: Synthetic oligonucleotide
  misc_feature 1..20: note = Target: SCN10A; (+) strand; PAM type: YTN; PAM sequence: TTC
  source 1..20: mol_type = other DNA
cacttttgtaaagtgcctat

SEQ ID NO: 73307 - DNA, 20 bp, synthetic construct
  misc_feature 1..20: note = Description of Artificial Sequence: Synthetic oligonucleotide
  misc_feature 1..20: note = Target: SCN10A; (+) strand; PAM type: YTN; PAM sequence: CTT
  source 1..20: mol_type = other DNA
ttgtaaagtgcctattcaaa

SEQ ID NO: 73308 - DNA, 20 bp, synthetic construct
  misc_feature 1..20: note = Description of Artificial Sequence: Synthetic oligonucleotide
  misc_feature 1..20: note = Target: SCN10A; (+) strand; PAM type: YTN; PAM sequence: TTT
  source 1..20: mol_type = other DNA
tgtaaagtgcctattcaaat

SEQ ID NO: 73309 - DNA, 20 bp, synthetic construct
  misc_feature 1..20: note = Description of Artificial Sequence: Synthetic oligonucleotide
  misc_feature 1..20: note = Target: SCN10A; (+) strand; PAM type: YTN; PAM sequence: TTT
  source 1..20: mol_type = other DNA
gtaaagtgcctattcaaatt

SEQ ID NO: 73310 - DNA, 20 bp, synthetic construct
  misc_feature 1..20: note = Description of Artificial Sequence: Synthetic oligonucleotide
  misc_feature 1..20: note = Target: SCN10A; (+) strand; PAM type: YTN; PAM sequence: TTG
  source 1..20: mol_type = other DNA
taaagtgcctattcaaattt

SEQ ID NO: 73311 - DNA, 20 bp, synthetic construct
  misc_feature 1..20: note = Description of Artificial Sequence: Synthetic oligonucleotide
  misc_feature 1..20: note = Target: SCN10A; (+) strand; PAM type: YTN; PAM sequence: CTA
  source 1..20: mol_type = other DNA
ttcaaattttgtgctatttt

SEQ ID NO: 73312 - DNA, 20 bp, synthetic construct
  misc_feature 1..20: note = Description of Artificial Sequence: Synthetic oligonucleotide
  misc_feature 1..20: note = Target: SCN10A; (+) strand; PAM type: YTN; PAM sequence: TTC
  source 1..20: mol_type = other DNA
aaattttgtgctattttaca

SEQ ID NO: 73313 - DNA, 20 bp, synthetic construct
  misc_feature 1..20: note = Description of Artificial Sequence: Synthetic oligonucleotide
  misc_feature 1..20: note = Target: SCN10A; (+) strand; PAM type: YTN; PAM sequence: TTT
  source 1..20: mol_type = other DNA
tgtgctattttacaagtggt

SEQ ID NO: 73314 - DNA, 20 bp, synthetic construct
  misc_feature 1..20: note = Description of Artificial Sequence: Synthetic oligonucleotide
  misc_feature 1..20: note = Target: SCN10A; (+) strand; PAM type: YTN; PAM sequence: TTT
  source 1..20: mol_type = other DNA
gtgctattttacaagtggtt

SEQ ID NO: 73315 - DNA, 20 bp, synthetic construct
  misc_feature 1..20: note = Description of Artificial Sequence: Synthetic oligonucleotide
  misc_feature 1..20: note = Target: SCN10A; (+) strand; PAM type: YTN; PAM sequence: TTG
  source 1..20: mol_type = other DNA
tgctattttacaagtggttg

SEQ ID NO: 73316 - DNA, 20 bp, synthetic construct
  misc_feature 1..20: note = Description of Artificial Sequence: Synthetic oligonucleotide
  misc_feature 1..20: note = Target: SCN10A; (+) strand; PAM type: YTN; PAM sequence: CTA
  source 1..20: mol_type = other DNA
ttttacaagtggttgttctg

SEQ ID NO: 73317 - DNA, 20 bp, synthetic construct
  misc_feature 1..20: note = Description of Artificial Sequence: Synthetic oligonucleotide
  misc_feature 1..20: note = Target: SCN10A; (+) strand; PAM type: YTN; PAM sequence: TTT
  source 1..20: mol_type = other DNA
tacaagtggttgttctgaca

SEQ ID NO: 73318 - DNA, 20 bp, synthetic construct
  misc_feature 1..20: note = Description of Artificial Sequence: Synthetic oligonucleotide
  misc_feature 1..20: note = Target: SCN10A; (+) strand; PAM type: YTN; PAM sequence: TTT
  source 1..20: mol_type = other DNA
acaagtggttgttctgacat

SEQ ID NO: 73319 - DNA, 20 bp, synthetic construct
  misc_feature 1..20: note = Description of Artificial Sequence: Synthetic oligonucleotide
  misc_feature 1..20: note = Target: SCN10A; (+) strand; PAM type: YTN; PAM sequence: TTA
  source 1..20: mol_type = other DNA
caagtggttgttctgacatt

SEQ ID NO: 73320 - DNA, 20 bp, synthetic construct
  misc_feature 1..20: note = Description of Artificial Sequence: Synthetic oligonucleotide
  misc_feature 1..20: note = Target: SCN10A; (+) strand; PAM type: YTN; PAM sequence: TTG
  source 1..20: mol_type = other DNA
ttctgacatttttctaattg

SEQ ID NO: 73321 - DNA, 20 bp, synthetic construct
  misc_feature 1..20: note = Description of Artificial Sequence: Synthetic oligonucleotide
  misc_feature 1..20: note = Target: SCN10A; (+) strand; PAM type: YTN; PAM sequence: TTC
  source 1..20: mol_type = other DNA
tgacatttttctaattgatt

SEQ ID NO: 73322 - DNA, 20 bp, synthetic construct
  misc_feature 1..20: note = Description of Artificial Sequence: Synthetic oligonucleotide
  misc_feature 1..20: note = Target: SCN10A; (+) strand; PAM type: YTN; PAM sequence: CTG
  source 1..20: mol_type = other DNA
acatttttctaattgatttg

SEQ ID NO: 73323 - DNA, 20 bp, synthetic construct
  misc_feature 1..20: note = Description of Artificial Sequence: Synthetic oligonucleotide
  misc_feature 1..20: note = Target: SCN10A; (+) strand; PAM type: YTN; PAM sequence: TTT
  source 1..20: mol_type = other DNA
ttctaattgatttgtagagt

SEQ ID NO: 73324 - DNA, 20 bp, synthetic construct
  misc_feature 1..20: note = Description of Artificial Sequence: Synthetic oligonucleotide
  misc_feature 1..20: note = Target: SCN10A; (+) strand; PAM type: YTN; PAM sequence: TTT
  source 1..20: mol_type = other DNA
tctaattgatttgtagagtt

SEQ ID NO: 73325 - DNA, 20 bp, synthetic construct
  misc_feature 1..20: note = Description of Artificial Sequence: Synthetic oligonucleotide
  misc_feature 1..20: note = Target: SCN10A; (+) strand; PAM type: YTN; PAM sequence: TTT
  source 1..20: mol_type = other DNA
ctaattgatttgtagagttc

SEQ ID NO: 73326 - DNA, 20 bp, synthetic construct
  misc_feature 1..20: note = Description of Artificial Sequence: Synthetic oligonucleotide
  misc_feature 1..20: note = Target: SCN10A; (+) strand; PAM type: YTN; PAM sequence: TTC
  source 1..20: mol_type = other DNA
taattgatttgtagagttca

SEQ ID NO: 73327 - DNA, 20 bp, synthetic construct
  misc_feature 1..20: note = Description of Artificial Sequence: Synthetic oligonucleotide
  misc_feature 1..20: note = Target: SCN10A; (+) strand; PAM type: YTN; PAM sequence: CTA
  source 1..20: mol_type = other DNA
attgatttgtagagttcatt

SEQ ID NO: 73328 - DNA, 20 bp, synthetic construct
  misc_feature 1..20: note = Description of Artificial Sequence: Synthetic oligonucleotide
  misc_feature 1..20: note = Target: SCN10A; (+) strand; PAM type: YTN; PAM sequence: TTG
  source 1..20: mol_type = other DNA
atttgtagagttcattactc

SEQ ID NO: 73329 - DNA, 20 bp, synthetic construct
  misc_feature 1..20: note = Description of Artificial Sequence: Synthetic oligonucleotide
  misc_feature 1..20: note = Target: SCN10A; (+) strand; PAM type: YTN; PAM sequence: TTT
  source 1..20: mol_type = other DNA
gtagagttcattactctgaa

SEQ ID NO: 73330 - DNA, 20 bp, synthetic construct
  misc_feature 1..20: note = Description of Artificial Sequence: Synthetic oligonucleotide
  misc_feature 1..20: note = Target: SCN10A; (+) strand; PAM type: YTN; PAM sequence: TTG
  source 1..20: mol_type = other DNA
tagagttcattactctgaat

SEQ ID NO: 73331 - DNA, 20 bp, synthetic construct
  misc_feature 1..20: note = Description of Artificial Sequence: Synthetic oligonucleotide
  misc_feature 1..20: note = Target: SCN10A; (+) strand; PAM type: YTN; PAM sequence: TTC
  source 1..20: mol_type = other DNA
attactctgaatataagcac

SEQ ID NO: 73332 - DNA, 20 bp, synthetic construct
  misc_feature 1..20: note = Description of Artificial Sequence: Synthetic oligonucleotide
  misc_feature 1..20: note = Target: SCN10A; (+) strand; PAM type: YTN; PAM sequence: TTA
  source 1..20: mol_type = other DNA
ctctgaatataagcacttgc

SEQ ID NO: 73333 - DNA, 20 bp, synthetic construct
  misc_feature 1..20: note = Description of Artificial Sequence: Synthetic oligonucleotide
  misc_feature 1..20: note = Target: SCN10A; (+) strand; PAM type: YTN; PAM sequence: CTC
  source 1..20: mol_type = other DNA
tgaatataagcacttgcttt

SEQ ID NO: 73334 - DNA, 20 bp, synthetic construct
  misc_feature 1..20: note = Description of Artificial Sequence: Synthetic oligonucleotide
  misc_feature 1..20: note = Target: SCN10A; (+) strand; PAM type: YTN; PAM sequence: CTG
  source 1..20: mol_type = other DNA
aatataagcacttgcttttt

SEQ ID NO: 73335 - DNA, 20 bp, synthetic construct
  misc_feature 1..20: note = Description of Artificial Sequence: Synthetic oligonucleotide
  misc_feature 1..20: note = Target: SCN10A; (+) strand; PAM type: YTN; PAM sequence: CTT
  source 1..20: mol_type = other DNA
gctttttcatgctcttaaag

SEQ ID NO: 73336 - DNA, 20 bp, synthetic construct
  misc_feature 1..20: note = Description of Artificial Sequence: Synthetic oligonucleotide
  misc_feature 1..20: note = Target: SCN10A; (+) strand; PAM type: YTN; PAM sequence: TTG
  source 1..20: mol_type = other DNA
ctttttcatgctcttaaagt

SEQ ID NO: 73337 - DNA, 20 bp, synthetic construct
  misc_feature 1..20: note = Description of Artificial Sequence: Synthetic oligonucleotide
  misc_feature 1..20: note = Target: SCN10A; (+) strand; PAM type: YTN; PAM sequence: CTT
  source 1..20: mol_type = other DNA
tttcatgctcttaaagttgt

SEQ ID NO: 73338 - DNA, 20 bp, synthetic construct
  misc_feature 1..20: note = Description of Artificial Sequence: Synthetic oligonucleotide
  misc_feature 1..20: note = Target: SCN10A; (+) strand; PAM type: YTN; PAM sequence: TTT
  source 1..20: mol_type = other DNA
ttcatgctcttaaagttgtc

SEQ ID NO: 73339 - DNA, 20 bp, synthetic construct
  misc_feature 1..20: note = Description of Artificial Sequence: Synthetic oligonucleotide
  misc_feature 1..20: note = Target: SCN10A; (+) strand; PAM type: YTN; PAM sequence: TTT
  source 1..20: mol_type = other DNA
tcatgctcttaaagttgtct

SEQ ID NO: 73340 - DNA, 20 bp, synthetic construct
  misc_feature 1..20: note = Description of Artificial Sequence: Synthetic oligonucleotide
  misc_feature 1..20: note = Target: SCN10A; (+) strand; PAM type: YTN; PAM sequence: TTT
  source 1..20: mol_type = other DNA
catgctcttaaagttgtctt

SEQ ID NO: 73341 - DNA, 20 bp, synthetic construct
  misc_feature 1..20: note = Description of Artificial Sequence: Synthetic oligonucleotide
  misc_feature 1..20: note = Target: SCN10A; (+) strand; PAM type: YTN; PAM sequence: TTC
  source 1..20: mol_type = other DNA
atgctcttaaagttgtcttc

SEQ ID NO: 73342 - DNA, 20 bp, synthetic construct
  misc_feature 1..20: note = Description of Artificial Sequence: Synthetic oligonucleotide
  misc_feature 1..20: note = Target: SCN10A; (+) strand; PAM type: YTN; PAM sequence: CTC
  source 1..20: mol_type = other DNA
ttaaagttgtcttctgatga

SEQ ID NO: 73343 - DNA, 20 bp, synthetic construct
  misc_feature 1..20: note = Description of Artificial Sequence: Synthetic oligonucleotide
  misc_feature 1..20: note = Target: SCN10A; (+) strand; PAM type: YTN; PAM sequence: CTT
  source 1..20: mol_type = other DNA
aaagttgtcttctgatgaac

SEQ ID NO: 73344 - DNA, 20 bp, synthetic construct
  misc_feature 1..20: note = Description of Artificial Sequence: Synthetic oligonucleotide
  misc_feature 1..20: note = Target: SCN10A; (+) strand; PAM type: YTN; PAM sequence: TTA
  source 1..20: mol_type = other DNA
aagttgtcttctgatgaaca

SEQ ID NO: 73345 - DNA, 20 bp, synthetic construct
  misc_feature 1..20: note = Description of Artificial Sequence: Synthetic oligonucleotide
  misc_feature 1..20: note = Target: SCN10A; (+) strand; PAM type: YTN; PAM sequence: TTG
  source 1..20: mol_type = other DNA
tcttctgatgaacattctta

SEQ ID NO: 73346 - DNA, 20 bp, synthetic construct
  misc_feature 1..20: note = Description of Artificial Sequence: Synthetic oligonucleotide
  misc_feature 1..20: note = Target: SCN10A; (+) strand; PAM type: YTN; PAM sequence: CTT
  source 1..20: mol_type = other DNA
ctgatgaacattcttaatta

SEQ ID NO: 73347 - DNA, 20 bp, synthetic construct
  misc_feature 1..20: note = Description of Artificial Sequence: Synthetic oligonucleotide
  misc_feature 1..20: note = Target: SCN10A; (+) strand; PAM type: YTN; PAM sequence: TTC
  source 1..20: mol_type = other DNA
tgatgaacattcttaattat

SEQ ID NO: 73348 - DNA, 20 bp, synthetic construct
  misc_feature 1..20: note = Description of Artificial Sequence: Synthetic oligonucleotide
  misc_feature 1..20: note = Target: SCN10A; (+) strand; PAM type: YTN; PAM sequence: CTG
  source 1..20: mol_type = other DNA
atgaacattcttaattatag

SEQ ID NO: 73349 - DNA, 20 bp, synthetic construct
  misc_feature 1..20: note = Description of Artificial Sequence: Synthetic oligonucleotide
  misc_feature 1..20: note = Target: SCN10A; (+) strand; PAM type: YTN; PAM sequence: TTC
  source 1..20: mol_type = other DNA
ttaattatagtatactaaaa

SEQ ID NO: 73350 - DNA, 20 bp, synthetic construct
  misc_feature 1..20: note = Description of Artificial Sequence: Synthetic oligonucleotide
  misc_feature 1..20: note = Target: SCN10A; (+) strand; PAM type: YTN; PAM sequence: CTT
  source 1..20: mol_type = other DNA
aattatagtatactaaaatg

SEQ ID NO: 73351 - DNA, 20 bp, synthetic construct
  misc_feature 1..20: note = Description of Artificial Sequence: Synthetic oligonucleotide
  misc_feature 1..20: note = Target: SCN10A; (+) strand; PAM type: YTN; PAM sequence: TTA
  source 1..20: mol_type = other DNA
attatagtatactaaaatgt

SEQ ID NO: 73352 - DNA, 20 bp, synthetic construct
  misc_feature 1..20: note = Description of Artificial Sequence: Synthetic oligonucleotide
  misc_feature 1..20: note = Target: SCN10A; (+) strand; PAM type: YTN; PAM sequence: TTA
  source 1..20: mol_type = other DNA
tagtatactaaaatgtatca

SEQ ID NO: 73353 - DNA, 20 bp, synthetic construct
  misc_feature 1..20: note = Description of Artificial Sequence: Synthetic oligonucleotide
  misc_feature 1..20: note = Target: SCN10A; (+) strand; PAM type: YTN; PAM sequence: CTA
  source 1..20: mol_type = other DNA
aaatgtatcagttttttcct

SEQ ID NO: 73354 - DNA, 20 bp, synthetic construct
  misc_feature 1..20: note = Description of Artificial Sequence: Synthetic oligonucleotide
  misc_feature 1..20: note = Target: SCN10A; (+) strand; PAM type: YTN; PAM sequence: TTT
  source 1..20: mol_type = other DNA
tttcctgtatagttagtgct

SEQ ID NO: 73355 - DNA, 20 bp, synthetic construct
  misc_feature 1..20: note = Description of Artificial Sequence: Synthetic oligonucleotide
  misc_feature 1..20: note = Target: SCN10A; (+) strand; PAM type: YTN; PAM sequence: TTT
  source 1..20: mol_type = other DNA
ttcctgtatagttagtgctt

SEQ ID NO: 73356 - DNA, 20 bp, synthetic construct
  misc_feature 1..20: note = Description of Artificial Sequence: Synthetic oligonucleotide
  misc_feature 1..20: note = Target: SCN10A; (+) strand; PAM type: YTN; PAM sequence: TTT
  source 1..20: mol_type = other DNA
tcctgtatagttagtgcttc

SEQ ID NO: 73357 - DNA, 20 bp, synthetic construct
  misc_feature 1..20: note = Description of Artificial Sequence: Synthetic oligonucleotide
  misc_feature 1..20: note = Target: SCN10A; (+) strand; PAM type: YTN; PAM sequence: TTT
  source 1..20: mol_type = other DNA
cctgtatagttagtgcttct

SEQ ID NO: 73358 - DNA, 20 bp, synthetic construct
  misc_feature 1..20: note = Description of Artificial Sequence: Synthetic oligonucleotide
  misc_feature 1..20: note = Target: SCN10A; (+) strand; PAM type: YTN; PAM sequence: TTC
  source 1..20: mol_type = other DNA
ctgtatagttagtgcttctt

SEQ ID NO: 73359 - DNA, 20 bp, synthetic construct
  misc_feature 1..20: note = Description of Artificial Sequence: Synthetic oligonucleotide
  misc_feature 1..20: note = Target: SCN10A; (+) strand; PAM type: YTN; PAM sequence: CTG
  source 1..20: mol_type = other DNA
tatagttagtgcttcttgtg

SEQ ID NO: 73360 - DNA, 20 bp, synthetic construct
  misc_feature 1..20: note = Description of Artificial Sequence: Synthetic oligonucleotide
  misc_feature 1..20: note = Target: SCN10A; (+) strand; PAM type: YTN; PAM sequence: TTA
  source 1..20: mol_type = other DNA
gtgcttcttgtgtcatatgt

SEQ ID NO: 73361 - DNA, 20 bp, synthetic construct
  misc_feature 1..20: note = Description of Artificial Sequence: Synthetic oligonucleotide
  misc_feature 1..20: note = Target: SCN10A; (+) strand; PAM type: YTN; PAM sequence: CTT
  source 1..20: mol_type = other DNA
cttgtgtcatatgtaataaa

SEQ ID NO: 73362 - DNA, 20 bp, synthetic construct
  misc_feature 1..20: note = Description of Artificial Sequence: Synthetic oligonucleotide
  misc_feature 1..20: note = Target: SCN10A; (+) strand; PAM type: YTN; PAM sequence: TTC
  source 1..20: mol_type = other DNA
ttgtgtcatatgtaataaag

SEQ ID NO: 73363 - DNA, 20 bp, synthetic construct
  misc_feature 1..20: note = Description of Artificial Sequence: Synthetic oligonucleotide
  misc_feature 1..20: note = Target: SCN10A; (+) strand; PAM type: YTN; PAM sequence: CTT
  source 1..20: mol_type = other DNA
gtgtcatatgtaataaagtt

SEQ ID NO: 73364 - DNA, 20 bp, synthetic construct
  misc_feature 1..20: note = Description of Artificial Sequence: Synthetic oligonucleotide
  misc_feature 1..20: note = Target: SCN10A; (+) strand; PAM type: YTN; PAM sequence: TTG
  source 1..20: mol_type = other DNA
tgtcatatgtaataaagttt

SEQ ID NO: 73365 - DNA, 20 bp, synthetic construct
  misc_feature 1..20: note = Description of Artificial Sequence: Synthetic oligonucleotide
  misc_feature 1..20: note = Target: SCN10A; (+) strand; PAM type: YTN; PAM sequence: TTT
  source 1..20: mol_type = other DNA
ttcttagtctgaggtcataa

SEQ ID NO: 73366 - DNA, 20 bp, synthetic construct
  misc_feature 1..20: note = Description of Artificial Sequence: Synthetic oligonucleotide
  misc_feature 1..20: note = Target: SCN10A; (+) strand; PAM type: YTN; PAM sequence: TTT
  source 1..20: mol_type = other DNA
tcttagtctgaggtcataaa

SEQ ID NO: 73367 - DNA, 20 bp, synthetic construct
  misc_feature 1..20: note = Description of Artificial Sequence: Synthetic oligonucleotide
  misc_feature 1..20: note = Target: SCN10A; (+) strand; PAM type: YTN; PAM sequence: TTT
  source 1..20: mol_type = other DNA
cttagtctgaggtcataaag

SEQ ID NO: 73368 - DNA, 20 bp, synthetic construct
  misc_feature 1..20: note = Description of Artificial Sequence: Synthetic oligonucleotide
  misc_feature 1..20: note = Target: SCN10A; (+) strand; PAM type: YTN; PAM sequence: TTC
  source 1..20: mol_type = other DNA
ttagtctgaggtcataaaga

SEQ ID NO: 73369 - DNA, 20 bp, synthetic construct
  misc_feature 1..20: note = Description of Artificial Sequence: Synthetic oligonucleotide
  misc_feature 1..20: note = Target: SCN10A; (+) strand; PAM type: YTN; PAM sequence: CTT
  source 1..20: mol_type = other DNA
agtctgaggtcataaagata

SEQ ID NO: 73370 - DNA, 20 bp, synthetic construct
  misc_feature 1..20: note = Description of Artificial Sequence: Synthetic oligonucleotide
  misc_feature 1..20: note = Target: SCN10A; (+) strand; PAM type: YTN; PAM sequence: TTA
  source 1..20: mol_type = other DNA
gtctgaggtcataaagatat

SEQ ID NO: 73371 - DNA, 20 bp, synthetic construct
  misc_feature 1..20: note = Description of Artificial Sequence: Synthetic oligonucleotide
  misc_feature 1..20: note = Target: SCN10A; (+) strand; PAM type: YTN; PAM sequence: CTG
  source 1..20: mol_type = other DNA
aggtcataaagatattcctc

SEQ ID NO: 73372 - DNA, 20 bp, synthetic construct
  misc_feature 1..20: note = Description of Artificial Sequence: Synthetic oligonucleotide
  misc_feature 1..20: note = Target: SCN10A; (+) strand; PAM type: YTN; PAM sequence: TTC
  source 1..20: mol_type = other DNA
ctctttgttttttcctttca

SEQ ID NO: 73373 - DNA, 20 bp, synthetic construct
  misc_feature 1..20: note = Description of Artificial Sequence: Synthetic oligonucleotide
  misc_feature 1..20: note = Target: SCN10A; (+) strand; PAM type: YTN; PAM sequence: CTC
  source 1..20: mol_type = other DNA
tttgttttttcctttcaaaa

SEQ ID NO: 73374 - DNA, 20 bp, synthetic construct
  misc_feature 1..20: note = Description of Artificial Sequence: Synthetic oligonucleotide
  misc_feature 1..20: note = Target: SCN10A; (+) strand; PAM type: YTN; PAM sequence: CTT
  source 1..20: mol_type = other DNA
tgttttttcctttcaaaaag

SEQ ID NO: 73375 - DNA, 20 bp, synthetic construct
  misc_feature 1..20: note = Description of Artificial Sequence: Synthetic oligonucleotide
  misc_feature 1..20: note = Target: SCN10A; (+) strand; PAM type: YTN; PAM sequence: TTT
  source 1..20: mol_type = other DNA
gttttttcctttcaaaaagc

SEQ ID NO: 73376 - DNA, 20 bp, synthetic construct
  misc_feature 1..20: note = Description of Artificial Sequence: Synthetic oligonucleotide
  misc_feature 1..20: note = Target: SCN10A; (+) strand; PAM type: YTN; PAM sequence: TTG
  source 1..20: mol_type = other DNA
ttttttcctttcaaaaagct

SEQ ID NO: 73377 - DNA, 20 bp, synthetic construct
  misc_feature 1..20: note = Description of Artificial Sequence: Synthetic oligonucleotide
  misc_feature 1..20: note = Target: SCN10A; (+) strand; PAM type: YTN; PAM sequence: TTT
  source 1..20: mol_type = other DNA
tttcctttcaaaaagcttat

SEQ ID NO: 73378 - DNA, 20 bp, synthetic construct
  misc_feature 1..20: note = Description of Artificial Sequence: Synthetic oligonucleotide
  misc_feature 1..20: note = Target: SCN10A; (+) strand; PAM type: YTN; PAM sequence: TTT
  source 1..20: mol_type = other DNA
ttcctttcaaaaagcttatc

SEQ ID NO: 73379 - DNA, 20 bp, synthetic construct
  misc_feature 1..20: note = Description of Artificial Sequence: Synthetic oligonucleotide
  misc_feature 1..20: note = Target: SCN10A; (+) strand; PAM type: YTN; PAM sequence: TTT
  source 1..20: mol_type = other DNA
tcctttcaaaaagcttatcc

SEQ ID NO: 73380 - DNA, 20 bp, synthetic construct
  misc_feature 1..20: note = Description of Artificial Sequence: Synthetic oligonucleotide
  misc_feature 1..20: note = Target: SCN10A; (+) strand; PAM type: YTN; PAM sequence: TTT
  source 1..20: mol_type = other DNA
cctttcaaaaagcttatcca

SEQ ID NO: 73381 - DNA, 20 bp, synthetic construct
  misc_feature 1..20: note = Description of Artificial Sequence: Synthetic oligonucleotide
  misc_feature 1..20: note = Target: SCN10A; (+) strand; PAM type: YTN; PAM sequence: TTC
  source 1..20: mol_type = other DNA
ctttcaaaaagcttatccac

SEQ ID NO: 73382 - DNA, 20 bp, synthetic construct
  misc_feature 1..20: note = Description of Artificial Sequence: Synthetic oligonucleotide
  misc_feature 1..20: note = Target: SCN10A; (+) strand; PAM type: YTN; PAM sequence: CTT
  source 1..20: mol_type = other DNA
tcaaaaagcttatccaccac

SEQ ID NO: 73383 - DNA, 20 bp, synthetic construct
  misc_feature 1..20: note = Description of Artificial Sequence: Synthetic oligonucleotide
  misc_feature 1..20: note = Target: SCN10A; (+) strand; PAM type: YTN; PAM sequence: TTT
  source 1..20: mol_type = other DNA
caaaaagcttatccaccacg

SEQ ID NO: 73384 - DNA, 20 bp, synthetic construct
  misc_feature 1..20: note = Description of Artificial Sequence: Synthetic oligonucleotide
  misc_feature 1..20: note = Target: SCN10A; (+) strand; PAM type: YTN; PAM sequence: TTC
  source 1..20: mol_type = other DNA
aaaaagcttatccaccacga

SEQ ID NO: 73385 - DNA, 20 bp, synthetic construct
  misc_feature 1..20: note = Description of Artificial Sequence: Synthetic oligonucleotide
  misc_feature 1..20: note = Target: SCN10A; (+) strand; PAM type: YTN; PAM sequence: CTT
  source 1..20: mol_type = other DNA
atccaccacgatcaagtcgg

SEQ ID NO: 73386 - DNA, 20 bp, synthetic construct
  misc_feature 1..20: note = Description of Artificial Sequence: Synthetic oligonucleotide
  misc_feature 1..20: note = Target: SCN10A; (+) strand; PAM type: YTN; PAM sequence: TTA
  source 1..20: mol_type = other DNA
tccaccacgatcaagtcggc

SEQ ID NO: 73387 - DNA, 20 bp, synthetic construct
  misc_feature 1..20: note = Description of Artificial Sequence: Synthetic oligonucleotide
  misc_feature 1..20: note = Target: SCN10A; (+) strand; PAM type: YTN; PAM sequence: CTT
  source 1..20: mol_type = other DNA
catacctgggatcaaagctg

SEQ ID NO: 73388 - DNA, 20 bp, synthetic construct
  misc_feature 1..20: note = Description of Artificial Sequence: Synthetic oligonucleotide
  misc_feature 1..20: note = Target: SCN10A; (+) strand; PAM type: YTN; PAM sequence: TTC
  source 1..20: mol_type = other DNA
atacctgggatcaaagctgg

SEQ ID NO: 73389 - DNA, 20 bp, synthetic construct
  misc_feature 1..20: note = Description of Artificial Sequence: Synthetic oligonucleotide
  misc_feature 1..20: note = Target: SCN10A; (+) strand; PAM type: YTN; PAM sequence: CTG
  source 1..20: mol_type = other DNA
ggatcaaagctggttcaaca

SEQ ID NO: 73390 - DNA, 20 bp, synthetic construct
  misc_feature 1..20: note = Description of Artificial Sequence: Synthetic oligonucleotide
  misc_feature 1..20: note = Target: SCN10A; (+) strand; PAM type: YTN; PAM sequence: CTG
  source 1..20: mol_type = other DNA
gttcaacatacgcaagtcaa

SEQ ID NO: 73391 - DNA, 20 bp, synthetic construct
  misc_feature 1..20: note = Description of Artificial Sequence: Synthetic oligonucleotide
  misc_feature 1..20: note = Target: SCN10A; (+) strand; PAM type: YTN; PAM sequence: TTC
  source 1..20: mol_type = other DNA
aacatacgcaagtcaataaa

SEQ ID NO: 73392 - DNA, 20 bp, synthetic construct
  misc_feature 1..20: note = Description of Artificial Sequence: Synthetic oligonucleotide
  misc_feature 1..20: note = Target: SCN10A; (+) strand; PAM type: YTN; PAM sequence: TTA
  source 1..20: mol_type = other DNA
tctcaatagatgcagaaaag

SEQ ID NO: 73393 - DNA, 20 bp, synthetic construct
  misc_feature 1..20: note = Description of Artificial Sequence: Synthetic oligonucleotide
  misc_feature 1..20: note = Target: SCN10A; (+) strand; PAM type: YTN; PAM sequence: CTC
  source 1..20: mol_type = other DNA
aatagatgcagaaaaggtct

SEQ ID NO: 73394 - DNA, 20 bp, synthetic construct
  misc_feature 1..20: note = Description of Artificial Sequence: Synthetic oligonucleotide
  misc_feature 1..20: note = Target: SCN10A; (+) strand; PAM type: YTN; PAM sequence: CTT
  source 1..20: mol_type = other DNA
cgacaaaattcaacacccat

SEQ ID NO: 73395 - DNA, 20 bp, synthetic construct
  misc_feature 1..20: note = Description of Artificial Sequence: Synthetic oligonucleotide
  misc_feature 1..20: note = Target: SCN10A; (+) strand; PAM type: YTN; PAM sequence: TTC
  source 1..20: mol_type = other DNA
gacaaaattcaacacccatt

SEQ ID NO: 73396 - DNA, 20 bp, synthetic construct
  misc_feature 1..20: note = Description of Artificial Sequence: Synthetic oligonucleotide
  misc_feature 1..20: note = Target: SCN10A; (+) strand; PAM type: YTN; PAM sequence: TTC
  source 1..20: mol_type = other DNA
aacacccattcatgctaaaa

SEQ ID NO: 73397 - DNA, 20 bp, synthetic construct
  misc_feature 1..20: note = Description of Artificial Sequence: Synthetic oligonucleotide
  misc_feature 1..20: note = Target: SCN10A; (+) strand; PAM type: YTN; PAM sequence: TTC
  source 1..20: mol_type = other DNA
atgctaaaagctctcaataa

SEQ ID NO: 73398 - DNA, 20 bp, synthetic construct
  misc_feature 1..20: note = Description of Artificial Sequence: Synthetic oligonucleotide
  misc_feature 1..20: note = Target: SCN10A; (+) strand; PAM type: YTN; PAM sequence: CTA
  source 1..20: mol_type = other DNA
aaagctctcaataaactagg

SEQ ID NO: 73399 - DNA, 20 bp, synthetic construct
  misc_feature 1..20: note = Description of Artificial Sequence: Synthetic oligonucleotide
  misc_feature 1..20: note = Target: SCN10A; (+) strand; PAM type: YTN; PAM sequence: CTC
  source 1..20: mol_type = other DNA
tcaataaactaggtattgat

SEQ ID NO: 73400 - DNA, 20 bp, synthetic construct
  misc_feature 1..20: note = Description of Artificial Sequence: Synthetic oligonucleotide
  misc_feature 1..20: note = Target: SCN10A; (+) strand; PAM type: YTN; PAM sequence: CTC
  source 1..20: mol_type = other DNA
aataaactaggtattgatgg

SEQ ID NO: 73401 - DNA, 20 bp, synthetic construct
  misc_feature 1..20: note = Description of Artificial Sequence: Synthetic oligonucleotide
  misc_feature 1..20: note = Target: SCN10A; (+) strand; PAM type: YTN; PAM sequence: CTA
  source 1..20: mol_type = other DNA
ggtattgatggaatgtatct

SEQ ID NO: 73402 - DNA, 20 bp, synthetic construct
  misc_feature 1..20: note = Description of Artificial Sequence: Synthetic oligonucleotide
  misc_feature 1..20: note = Target: SCN10A; (+) strand; PAM type: YTN; PAM sequence: TTG
  source 1..20: mol_type = other DNA
atggaatgtatctcaaaata

SEQ ID NO: 73403 - DNA, 20 bp, synthetic construct
  misc_feature 1..20: note = Description of Artificial Sequence: Synthetic oligonucleotide
  misc_feature 1..20: note = Target: SCN10A; (+) strand; PAM type: YTN; PAM sequence: CTC
  source 1..20: mol_type = other DNA
aaaataataagaactattta

SEQ ID NO: 73404 - DNA, 20 bp, synthetic construct
  misc_feature 1..20: note = Description of Artificial Sequence: Synthetic oligonucleotide
  misc_feature 1..20: note = Target: SCN10A; (+) strand; PAM type: YTN; PAM sequence: CTA
  source 1..20: mol_type = other DNA
tttatgacaagcccccagcc

SEQ ID NO: 73405 - DNA, 20 bp, synthetic construct
  misc_feature 1..20: note = Description of Artificial Sequence: Synthetic oligonucleotide
  misc_feature 1..20: note = Target: SCN10A; (+) strand; PAM type: YTN; PAM sequence: TTT
  source 1..20: mol_type = other DNA
atgacaagcccccagccaat

SEQ ID NO: 73406 - DNA, 20 bp, synthetic construct
  misc_feature 1..20: note = Description of Artificial Sequence: Synthetic oligonucleotide
  misc_feature 1..20: note = Target: SCN10A; (+) strand; PAM type: YTN; PAM sequence: TTA
  source 1..20: mol_type = other DNA
tgacaagcccccagccaata

SEQ ID NO: 73407 - DNA, 20 bp, synthetic construct
  misc_feature 1..20: note = Description of Artificial Sequence: Synthetic oligonucleotide
  misc_feature 1..20: note = Target: SCN10A; (+) strand; PAM type: YTN; PAM sequence: CTG
  source 1..20: mol_type = other DNA
aatgggcaaaaactggaagc

SEQ ID NO: 73408 - DNA, 20 bp, synthetic construct
  misc_feature 1..20: note = Description of Artificial Sequence: Synthetic oligonucleotide
  misc_feature 1..20: note = Target: SCN10A; (+) strand; PAM type: YTN; PAM sequence: CTG
  source 1..20: mol_type = other DNA
gaagcatttcctttgaaaac

SEQ ID NO: 73409 - DNA, 20 bp, synthetic construct
  misc_feature 1..20: note = Description of Artificial Sequence: Synthetic oligonucleotide
  misc_feature 1..20: note = Target: SCN10A; (+) strand; PAM type: YTN; PAM sequence: TTT
  source 1..20: mol_type = other DNA
cctttgaaaaccagcacaag

SEQ ID NO: 73410 - DNA, 20 bp, synthetic construct
  misc_feature 1..20: note = Description of Artificial Sequence: Synthetic oligonucleotide
  misc_feature 1..20: note = Target: SCN10A; (+) strand; PAM type: YTN; PAM sequence: TTC
  source 1..20: mol_type = other DNA
ctttgaaaaccagcacaaga

SEQ ID NO: 73411 - DNA, 20 bp, synthetic construct
  misc_feature 1..20: note = Description of Artificial Sequence: Synthetic oligonucleotide
  misc_feature 1..20: note = Target: SCN10A; (+) strand; PAM type: YTN; PAM sequence: CTT
  source 1..20: mol_type = other DNA
tgaaaaccagcacaagacaa

SEQ ID NO: 73412 - DNA, 20 bp, synthetic construct
  misc_feature 1..20: note = Description of Artificial Sequence: Synthetic oligonucleotide
  misc_feature 1..20: note = Target: SCN10A; (+) strand; PAM type: YTN; PAM sequence: TTT
  source 1..20: mol_type = other DNA
gaaaaccagcacaagacaag

SEQ ID NO: 73413 - DNA, 20 bp, synthetic construct
  misc_feature 1..20: note = Description of Artificial Sequence: Synthetic oligonucleotide
  misc_feature 1..20: note = Target: SCN10A; (+) strand; PAM type: YTN; PAM sequence: TTG
  source 1..20: mol_type = other DNA
aaaaccagcacaagacaaga

SEQ ID NO: 73414 - DNA, 20 bp, synthetic construct
  misc_feature 1..20: note = Description of Artificial Sequence: Synthetic oligonucleotide
  misc_feature 1..20: note = Target: SCN10A; (+) strand; PAM type: YTN; PAM sequence: CTA
  source 1..20: mol_type = other DNA
tctcaccactcttattcaac

SEQ ID NO: 73415 - DNA, 20 bp, synthetic construct
  misc_feature 1..20: note = Description of Artificial Sequence: Synthetic oligonucleotide
  misc_feature 1..20: note = Target: SCN10A; (+) strand; PAM type: YTN; PAM sequence: CTC
  source 1..20: mol_type = other DNA
accactcttattcaacatag

SEQ ID NO: 73416 - DNA, 20 bp, synthetic construct
  misc_feature 1..20: note = Description of Artificial Sequence: Synthetic oligonucleotide
  misc_feature 1..20: note = Target: SCN10A; (+) strand; PAM type: YTN; PAM sequence: CTC
  source 1..20: mol_type = other DNA
ttattcaacatagtattgga

SEQ ID NO: 73417 - DNA, 20 bp, synthetic construct
  misc_feature 1..20: note = Description of Artificial Sequence: Synthetic oligonucleotide
  misc_feature 1..20: note = Target: SCN10A; (+) strand; PAM type: YTN; PAM sequence: CTT
  source 1..20: mol_type = other DNA
attcaacatagtattggaag

SEQ ID NO: 73418 - DNA, 20 bp, synthetic construct
  misc_feature 1..20: note = Description of Artificial Sequence: Synthetic oligonucleotide
  misc_feature 1..20: note = Target: SCN10A; (+) strand; PAM type: YTN; PAM sequence: TTA
  source 1..20: mol_type = other DNA
ttcaacatagtattggaagt

SEQ ID NO: 73419 - DNA, 20 bp, synthetic construct
  misc_feature 1..20: note = Description of Artificial Sequence: Synthetic oligonucleotide
  misc_feature 1..20: note = Target: SCN10A; (+) strand; PAM type: YTN; PAM sequence: TTC
  source 1..20: mol_type = other DNA
aacatagtattggaagttct

SEQ ID NO: 73420 - DNA, 20 bp, synthetic construct
  misc_feature 1..20: note = Description of Artificial Sequence: Synthetic oligonucleotide
  misc_feature 1..20: note = Target: SCN10A; (+) strand; PAM type: YTN; PAM sequence: TTG
  source 1..20: mol_type = other DNA
gaagttctggccagggcgat

SEQ ID NO: 73421 - DNA, 20 bp, synthetic construct
  misc_feature 1..20: note = Description of Artificial Sequence: Synthetic oligonucleotide
  misc_feature 1..20: note = Target: SCN10A; (+) strand; PAM type: YTN; PAM sequence: TTC
  source 1..20: mol_type = other DNA
tggccagggcgatcaggcaa

SEQ ID NO: 73422 - DNA, 20 bp, synthetic construct
  misc_feature 1..20: note = Description of Artificial Sequence: Synthetic oligonucleotide
  misc_feature 1..20: note = Target: SCN10A; (+) strand; PAM type: YTN; PAM sequence: CTG
  source 1..20: mol_type = other DNA
gccagggcgatcaggcaaga

SEQ ID NO: 73423 - DNA, 20 bp, synthetic construct
  misc_feature 1..20: note = Description of Artificial Sequence: Synthetic oligonucleotide
  misc_feature 1..20: note = Target: SCN10A; (+) strand; PAM type: YTN; PAM sequence: TTC
  source 1..20: mol_type = other DNA
aaataggaaaagaggaagtc

SEQ ID NO: 73424 - DNA, 20 bp, synthetic construct
  misc_feature 1..20: note = Description of Artificial Sequence: Synthetic oligonucleotide
  misc_feature 1..20: note = Target: SCN10A; (+) strand; PAM type: YTN; PAM sequence: TTG
  source 1..20: mol_type = other DNA
tctctgtttgcagatgacat

SEQ ID NO: 73425 - DNA, 20 bp, synthetic construct
  misc_feature 1..20: note = Description of Artificial Sequence: Synthetic oligonucleotide
  misc_feature 1..20: note = Target: SCN10A; (+) strand; PAM type: YTN; PAM sequence: CTC
  source 1..20: mol_type = other DNA
tgtttgcagatgacatgact

SEQ ID NO: 73426 - DNA, 20 bp, synthetic construct
  misc_feature 1..20: note = Description of Artificial Sequence: Synthetic oligonucleotide
  misc_feature 1..20: note = Target: SCN10A; (+) strand; PAM type: YTN; PAM sequence: CTG
  source 1..20: mol_type = other DNA
tttgcagatgacatgactgt

SEQ ID NO: 73427 - DNA, 20 bp, synthetic construct
  misc_feature 1..20: note = Description of Artificial Sequence: Synthetic oligonucleotide
  misc_feature 1..20: note = Target: SCN10A; (+) strand; PAM type: YTN; PAM sequence: TTT
  source 1..20: mol_type = other DNA
gcagatgacatgactgtata

SEQ ID NO: 73428 - DNA, 20 bp, synthetic construct
  misc_feature 1..20: note = Description of Artificial Sequence: Synthetic oligonucleotide
  misc_feature 1..20: note = Target: SCN10A; (+) strand; PAM type: YTN; PAM sequence: TTG
  source 1..20: mol_type = other DNA
cagatgacatgactgtatat

SEQ ID NO: 73429 - DNA, 20 bp, synthetic construct
  misc_feature 1..20: note = Description of Artificial Sequence: Synthetic oligonucleotide
  misc_feature 1..20: note = Target: SCN10A; (+) strand; PAM type: YTN; PAM sequence: CTG
  source 1..20: mol_type = other DNA
tatatttagaaaaccccatc

SEQ ID NO: 73430 - DNA, 20 bp, synthetic construct
  misc_feature 1..20: note = Description of Artificial Sequence: Synthetic oligonucleotide
  misc_feature 1..20: note = Target: SCN10A; (+) strand; PAM type: YTN; PAM sequence: TTT
  source 1..20: mol_type = other DNA
agaaaaccccatcatctcag

SEQ ID NO: 73431 - DNA, 20 bp, synthetic construct
  misc_feature 1..20: note = Description of Artificial Sequence: Synthetic oligonucleotide
  misc_feature 1..20: note = Target: SCN10A; (+) strand; PAM type: YTN; PAM sequence: TTA
  source 1..20: mol_type = other DNA
gaaaaccccatcatctcagc

SEQ ID NO: 73432 - DNA, 20 bp, synthetic construct
  misc_feature 1..20: note = Description of Artificial Sequence: Synthetic oligonucleotide
  misc_feature 1..20: note = Target: SCN10A; (+) strand; PAM type: YTN; PAM sequence: CTC
  source 1..20: mol_type = other DNA
agcccaaaatctccttaagc

SEQ ID NO: 73433 - DNA, 20 bp, synthetic construct
  misc_feature 1..20: note = Description of Artificial Sequence: Synthetic oligonucleotide
  misc_feature 1..20: note = Target: SCN10A; (+) strand; PAM type: YTN; PAM sequence: CTC
  source 1..20: mol_type = other DNA
cttaagctgataagcaactt

SEQ ID NO: 73434 - DNA, 20 bp, synthetic construct
  misc_feature 1..20: note = Description of Artificial Sequence: Synthetic oligonucleotide
  misc_feature 1..20: note = Target: SCN10A; (+) strand; PAM type: YTN; PAM sequence: CTT
  source 1..20: mol_type = other DNA
aagctgataagcaacttcag

SEQ ID NO: 73435 - DNA, 20 bp, synthetic construct
  misc_feature 1..20: note = Description of Artificial Sequence: Synthetic oligonucleotide
  misc_feature 1..20: note = Target: SCN10A; (+) strand; PAM type: YTN; PAM sequence: TTA
  source 1..20: mol_type = other DNA
agctgataagcaacttcagc

SEQ ID NO: 73436 - DNA, 20 bp, synthetic construct
  misc_feature 1..20: note = Description of Artificial Sequence: Synthetic oligonucleotide
  misc_feature 1..20: note = Target: SCN10A; (+) strand; PAM type: YTN; PAM sequence: CTG
  source 1..20: mol_type = other DNA
ataagcaacttcagcaaagt

SEQ ID NO: 73437 - DNA, 20 bp, synthetic construct
  misc_feature 1..20: note = Description of Artificial Sequence: Synthetic oligonucleotide
  misc_feature 1..20: note = Target: SCN10A; (+) strand; PAM type: YTN; PAM sequence: CTT
  source 1..20: mol_type = other DNA
cagcaaagtctcaggataca

SEQ ID NO: 73438 - DNA, 20 bp, synthetic construct
  misc_feature 1..20: note = Description of Artificial Sequence: Synthetic oligonucleotide
  misc_feature 1..20: note = Target: SCN10A; (+) strand; PAM type: YTN; PAM sequence: TTC
  source 1..20: mol_type = other DNA
agcaaagtctcaggatacaa

SEQ ID NO: 73439 - DNA, 20 bp, synthetic construct
  misc_feature 1..20: note = Description of Artificial Sequence: Synthetic oligonucleotide
  misc_feature 1..20: note = Target: SCN10A; (+) strand; PAM type: YTN; PAM sequence: CTC
  source 1..20: mol_type = other DNA
aggatacaaaatcaatgtgc

SEQ ID NO: 73440 - DNA, 20 bp, synthetic construct
  misc_feature 1..20: note = Description of Artificial Sequence: Synthetic oligonucleotide
  misc_feature 1..20: note = Target: SCN10A; (+) strand; PAM type: YTN; PAM sequence: TTC
  source 1..20: mol_type = other DNA
ccatacaccaataacagaca

SEQ ID NO: 73441 - DNA, 20 bp, synthetic construct
  misc_feature 1..20: note = Description of Artificial Sequence: Synthetic oligonucleotide
  misc_feature 1..20: note = Target: SCN10A; (+) strand; PAM type: YTN; PAM sequence: CTC
  source 1..20: mol_type = other DNA
ccattcacaattgcaacaaa

SEQ ID NO: 73442 - DNA, 20 bp, synthetic construct
  misc_feature 1..20: note = Description of Artificial Sequence: Synthetic oligonucleotide
  misc_feature 1..20: note = Target: SCN10A; (+) strand; PAM type: YTN; PAM sequence: TTC
  source 1..20: mol_type = other DNA
acaattgcaacaaagagaat

SEQ ID NO: 73443 - DNA, 20 bp, synthetic construct
  misc_feature 1..20: note = Description of Artificial Sequence: Synthetic oligonucleotide
  misc_feature 1..20: note = Target: SCN10A; (+) strand; PAM type: YTN; PAM sequence: TTG
  source 1..20: mol_type = other DNA
caacaaagagaataaaatat

SEQ ID NO: 73444 - DNA, 20 bp, synthetic construct
  misc_feature 1..20: note = Description of Artificial Sequence: Synthetic oligonucleotide
  misc_feature 1..20: note = Target: SCN10A; (+) strand; PAM type: YTN; PAM sequence: CTA
  source 1..20: mol_type = other DNA
gaaatacaacttacaaggga

SEQ ID NO: 73445 - DNA, 20 bp, synthetic construct
  misc_feature 1..20: note = Description of Artificial Sequence: Synthetic oligonucleotide
  misc_feature 1..20: note = Target: SCN10A; (+) strand; PAM type: YTN; PAM sequence: CTT
  source 1..20: mol_type = other DNA
acaagggatgtgaaggacct

SEQ ID NO: 73446 - DNA, 20 bp, synthetic construct
  misc_feature 1..20: note = Description of Artificial Sequence: Synthetic oligonucleotide
  misc_feature 1..20: note = Target: SCN10A; (+) strand; PAM type: YTN; PAM sequence: TTA
  source 1..20: mol_type = other DNA
caagggatgtgaaggacctc

SEQ ID NO: 73447 - DNA, 20 bp, synthetic construct
  misc_feature 1..20: note = Description of Artificial Sequence: Synthetic oligonucleotide
  misc_feature 1..20: note = Target: SCN10A; (+) strand; PAM type: YTN; PAM sequence: CTC
  source 1..20: mol_type = other DNA
ttcaaggagaactaaaaatc

SEQ ID NO: 73448 - DNA, 20 bp, synthetic construct
  misc_feature 1..20: note = Description of Artificial Sequence: Synthetic oligonucleotide
  misc_feature 1..20: note = Target: SCN10A; (+) strand; PAM type: YTN; PAM sequence: CTT
  source 1..20: mol_type = other DNA
caaggagaactaaaaatcac

SEQ ID NO: 73449 - DNA, 20 bp, synthetic construct
  misc_feature 1..20: note = Description of Artificial Sequence: Synthetic oligonucleotide
  misc_feature 1..20: note = Target: SCN10A; (+) strand; PAM type: YTN; PAM sequence: TTC
  source 1..20: mol_type = other DNA
aaggagaactaaaaatcact

SEQ ID NO: 73450 - DNA, 20 bp, synthetic construct
  misc_feature 1..20: note = Description of Artificial Sequence: Synthetic oligonucleotide
  misc_feature 1..20: note = Target: SCN10A; (+) strand; PAM type: YTN; PAM sequence: CTA
  source 1..20: mol_type = other DNA
aaaatcactgctcaaggaaa

SEQ ID NO: 73451 - DNA, 20 bp, synthetic construct
  misc_feature 1..20: note = Description of Artificial Sequence: Synthetic oligonucleotide
  misc_feature 1..20: note = Target: SCN10A; (+) strand; PAM type: YTN; PAM sequence: CTG
  source 1..20: mol_type = other DNA
ctcaaggaaataagagagga

SEQ ID NO: 73452 - DNA, 20 bp, synthetic construct
  misc_feature 1..20: note = Description of Artificial Sequence: Synthetic oligonucleotide
  misc_feature 1..20: note = Target: SCN10A; (+) strand; PAM type: YTN; PAM sequence: CTC
  source 1..20: mol_type = other DNA
aaggaaataagagaggacac

SEQ ID NO: 73453 - DNA, 20 bp, synthetic construct
  misc_feature 1..20: note = Description of Artificial Sequence: Synthetic oligonucleotide
  misc_feature 1..20: note = Target: SCN10A; (+) strand; PAM type: YTN; PAM sequence: TTC
  source 1..20: mol_type = other DNA
catgctcatggataggaaaa

SEQ ID NO: 73454 - DNA, 20 bp, synthetic construct
  misc_feature 1..20: note = Description of Artificial Sequence: Synthetic oligonucleotide
  misc_feature 1..20: note = Target: SCN10A; (+) strand; PAM type: YTN; PAM sequence: CTC
  source 1..20: mol_type = other DNA
atggataggaaaaatcaata

SEQ ID NO: 73455 - DNA, 20 bp, synthetic construct
  misc_feature 1..20: note = Description of Artificial Sequence: Synthetic oligonucleotide
  misc_feature 1..20: note = Target: SCN10A; (+) strand; PAM type: YTN; PAM sequence: TTG
  source 1..20: mol_type = other DNA
tgaaaatggccatactgccc

SEQ ID NO: 73456 - DNA, 20 bp, synthetic construct
  misc_feature 1..20: note = Description of Artificial Sequence: Synthetic oligonucleotide
  misc_feature 1..20: note = Target: SCN10A; (+) strand; PAM type: YTN; PAM sequence: CTG
  source 1..20: mol_type = other DNA
cccaaagtaatttatagatt

SEQ ID NO: 73457 - DNA, 20 bp, synthetic construct
  misc_feature 1..20: note = Description of Artificial Sequence: Synthetic oligonucleotide
  misc_feature 1..20: note = Target: SCN10A; (+) strand; PAM type: YTN; PAM sequence: TTT
  source 1..20: mol_type = other DNA
atagattcaatgttatcccc

SEQ ID NO: 73458 - DNA, 20 bp, synthetic construct
  misc_feature 1..20: note = Description of Artificial Sequence: Synthetic oligonucleotide
  misc_feature 1..20: note = Target: SCN10A; (+) strand; PAM type: YTN; PAM sequence: TTA
  source 1..20: mol_type = other DNA
tagattcaatgttatcccca

SEQ ID NO: 73459 - DNA, 20 bp, synthetic construct
  misc_feature 1..20: note = Description of Artificial Sequence: Synthetic oligonucleotide
  misc_feature 1..20: note = Target: SCN10A; (+) strand; PAM type: YTN; PAM sequence: TTC
  source 1..20: mol_type = other DNA
aatgttatccccatcaagct

SEQ ID NO: 73460 - DNA, 20 bp, synthetic construct
  misc_feature 1..20: note = Description of Artificial Sequence: Synthetic oligonucleotide
  misc_feature 1..20: note = Target: SCN10A; (+) strand; PAM type: YTN; PAM sequence: TTA
  source 1..20: mol_type = other DNA
tccccatcaagctaccactg

SEQ ID NO: 73461 - DNA, 20 bp, synthetic construct
  misc_feature 1..20: note = Description of Artificial Sequence: Synthetic oligonucleotide
  misc_feature 1..20: note = Target: SCN10A; (+) strand; PAM type: YTN; PAM sequence: CTA
  source 1..20: mol_type = other DNA
ccactgactttcttcacaga

SEQ ID NO: 73462 - DNA, 20 bp, synthetic construct
  misc_feature 1..20: note = Description of Artificial Sequence: Synthetic oligonucleotide
  misc_feature 1..20: note = Target: SCN10A; (+) strand; PAM type: YTN; PAM sequence: CTG
  source 1..20: mol_type = other DNA
actttcttcacagaattaga

SEQ ID NO: 73463 - DNA, 20 bp, synthetic construct
  misc_feature 1..20: note = Description of Artificial Sequence: Synthetic oligonucleotide
  misc_feature 1..20: note = Target: SCN10A; (+) strand; PAM type: YTN; PAM sequence: CTT
  source 1..20: mol_type = other DNA
tcttcacagaattagaaaaa

SEQ ID NO: 73464 - DNA, 20 bp, synthetic construct
  misc_feature 1..20: note = Description of Artificial Sequence: Synthetic oligonucleotide
  misc_feature 1..20: note = Target: SCN10A; (+) strand; PAM type: YTN; PAM sequence: TTT
  source 1..20: mol_type = other DNA
cttcacagaattagaaaaat

SEQ ID NO: 73465 - DNA, 20 bp, synthetic construct
  misc_feature 1..20: note = Description of Artificial Sequence: Synthetic oligonucleotide
  misc_feature 1..20: note = Target: SCN10A; (+) strand; PAM type: YTN; PAM sequence: TTC
  source 1..20: mol_type = other DNA
ttcacagaattagaaaaatc

SEQ ID NO: 73466 - DNA, 20 bp, synthetic construct
  misc_feature 1..20: note = Description of Artificial Sequence: Synthetic oligonucleotide
  misc_feature 1..20: note = Target: SCN10A; (+) strand; PAM type: YTN; PAM sequence: CTT
  source 1..20: mol_type = other DNA
cacagaattagaaaaatcta

SEQ ID NO: 73467 - DNA, 20 bp, synthetic construct
  misc_feature 1..20: note = Description of Artificial Sequence: Synthetic oligonucleotide
  misc_feature 1..20: note = Target: SCN10A; (+) strand; PAM type: YTN; PAM sequence: TTC
  source 1..20: mol_type = other DNA
acagaattagaaaaatctac

SEQ ID NO: 73468 - DNA, 20 bp, synthetic construct
  misc_feature 1..20: note = Description of Artificial Sequence: Synthetic oligonucleotide
  misc_feature 1..20: note = Target: SCN10A; (+) strand; PAM type: YTN; PAM sequence: TTA
  source 1..20: mol_type = other DNA
gaaaaatctactttaaattt

SEQ ID NO: 73469 - DNA, 20 bp, synthetic construct
  misc_feature 1..20: note = Description of Artificial Sequence: Synthetic oligonucleotide
  misc_feature 1..20: note = Target: SCN10A; (+) strand; PAM type: YTN; PAM sequence: CTA
  source 1..20: mol_type = other DNA
ctttaaatttcatgtggaac

SEQ ID NO: 73470 - DNA, 20 bp, synthetic construct
  misc_feature 1..20: note = Description of Artificial Sequence: Synthetic oligonucleotide
  misc_feature 1..20: note = Target: SCN10A; (+) strand; PAM type: YTN; PAM sequence: CTT
  source 1..20: mol_type = other DNA
taaatttcatgtggaacaaa

SEQ ID NO: 73471 - DNA, 20 bp, synthetic construct
  misc_feature 1..20: note = Description of Artificial Sequence: Synthetic oligonucleotide
  misc_feature 1..20: note = Target: SCN10A; (+) strand; PAM type: YTN; PAM sequence: TTT
  source 1..20: mol_type = other DNA
aaatttcatgtggaacaaaa

SEQ ID NO: 73472 - DNA, 20 bp, synthetic construct
  misc_feature 1..20: note = Description of Artificial Sequence: Synthetic oligonucleotide
  misc_feature 1..20: note = Target: SCN10A; (+) strand; PAM type: YTN; PAM sequence: TTA
  source 1..20: mol_type = other DNA
aatttcatgtggaacaaaaa

SEQ ID NO: 73473 - DNA, 20 bp, synthetic construct
  misc_feature 1..20: note = Description of Artificial Sequence: Synthetic oligonucleotide
  misc_feature 1..20: note = Target: SCN10A; (+) strand; PAM type: YTN; PAM sequence: TTT
  source 1..20: mol_type = other DNA
catgtggaacaaaaaagagc

SEQ ID NO: 73474 - DNA, 20 bp, synthetic construct
  misc_feature 1..20: note = Description of Artificial Sequence: Synthetic oligonucleotide
  misc_feature 1..20: note = Target: SCN10A; (+) strand; PAM type: YTN; PAM sequence: TTC
  source 1..20: mol_type = other DNA
atgtggaacaaaaaagagcc

SEQ ID NO: 73475 - DNA, 20 bp, synthetic construct
  misc_feature 1..20: note = Description of Artificial Sequence: Synthetic oligonucleotide
  misc_feature 1..20: note = Target: SCN10A; (+) strand; PAM type: YTN; PAM sequence: TTC
  source 1..20: mol_type = other DNA
taagcaaaaagaagaaagtt

SEQ ID NO: 73476 - DNA, 20 bp, synthetic construct
  misc_feature 1..20: note = Description of Artificial Sequence: Synthetic oligonucleotide
  misc_feature 1..20: note = Target: SCN10A; (+) strand; PAM type: YTN; PAM sequence: CTA
  source 1..20: mol_type = other DNA
agcaaaaagaagaaagttgg

SEQ ID NO: 73477 - DNA, 20 bp, synthetic construct
  misc_feature 1..20: note = Description of Artificial Sequence: Synthetic oligonucleotide
  misc_feature 1..20: note = Target: SCN10A; (+) strand; PAM type: YTN; PAM sequence: TTG
  source 1..20: mol_type = other DNA
gaggcatcacgctacctgac

SEQ ID NO: 73478 - DNA, 20 bp, synthetic construct
  misc_feature 1..20: note = Description of Artificial Sequence: Synthetic oligonucleotide
  misc_feature 1..20: note = Target: SCN10A; (+) strand; PAM type: YTN; PAM sequence: CTA
  source 1..20: mol_type = other DNA
cctgacttcaagctatacta

SEQ ID NO: 73479 - DNA, 20 bp, synthetic construct
  misc_feature 1..20: note = Description of Artificial Sequence: Synthetic oligonucleotide
  misc_feature 1..20: note = Target: SCN10A; (+) strand; PAM type: YTN; PAM sequence: CTG
  source 1..20: mol_type = other DNA
acttcaagctatactacaaa

SEQ ID NO: 73480 - DNA, 20 bp, synthetic construct
  misc_feature 1..20: note = Description of Artificial Sequence: Synthetic oligonucleotide
  misc_feature 1..20: note = Target: SCN10A; (+) strand; PAM type: YTN; PAM sequence: CTT
  source 1..20: mol_type = other DNA
caagctatactacaaagcta

SEQ ID NO: 73481 - DNA, 20 bp, synthetic construct
  misc_feature 1..20: note = Description of Artificial Sequence: Synthetic oligonucleotide
  misc_feature 1..20: note = Target: SCN10A; (+) strand; PAM type: YTN; PAM sequence: TTC
  source 1..20: mol_type = other DNA
aagctatactacaaagctac

SEQ ID NO: 73482 - DNA, 20 bp, synthetic construct
  misc_feature 1..20: note = Description of Artificial Sequence: Synthetic oligonucleotide
  misc_feature 1..20: note = Target: SCN10A; (+) strand; PAM type: YTN; PAM sequence: CTA
  source 1..20: mol_type = other DNA
tactacaaagctacagtaac

SEQ ID NO: 73483 - DNA, 20 bp, synthetic construct
  misc_feature 1..20: note = Description of Artificial Sequence: Synthetic oligonucleotide
  misc_feature 1..20: note = Target: SCN10A; (+) strand; PAM type: YTN; PAM sequence: CTA
  source 1..20: mol_type = other DNA
caaagctacagtaaccaaaa

SEQ ID NO: 73484 - DNA, 20 bp, synthetic construct
  misc_feature 1..20: note = Description of Artificial Sequence: Synthetic oligonucleotide
  misc_feature 1..20: note = Target: SCN10A; (+) strand; PAM type: YTN; PAM sequence: CTA
  source 1..20: mol_type = other DNA
cagtaaccaaaacagcgagg

SEQ ID NO: 73485 - DNA, 20 bp, synthetic construct
  misc_feature 1..20: note = Description of Artificial Sequence: Synthetic oligonucleotide
  misc_feature 1..20: note = Target: SCN10A; (+) strand; PAM type: YTN; PAM sequence: CTG
  source 1..20: mol_type = other DNA
gtaccaaaacagatatctag

SEQ ID NO: 73486 - DNA, 20 bp, synthetic construct
  misc_feature 1..20: note = Description of Artificial Sequence: Synthetic oligonucleotide
  misc_feature 1..20: note = Target: SCN10A; (+) strand; PAM type: YTN; PAM sequence: CTA
  source 1..20: mol_type = other DNA
gaccaatggaacagaacaga

SEQ ID NO: 73487 - DNA, 20 bp, synthetic construct
  misc_feature 1..20: note = Description of Artificial Sequence: Synthetic oligonucleotide
  misc_feature 1..20: note = Target: SCN10A; (+) strand; PAM type: YTN; PAM sequence: CTC
  source 1..20: mol_type = other DNA
agaagtaacaccgcatatct

SEQ ID NO: 73488 - DNA, 20 bp, synthetic construct
  misc_feature 1..20: note = Description of Artificial Sequence: Synthetic oligonucleotide
  misc_feature 1..20: note = Target: SCN10A; (+) strand; PAM type: YTN; PAM sequence: CTA
  source 1..20: mol_type = other DNA
caaccatctgatctttgaca

SEQ ID NO: 73489 - DNA, 20 bp, synthetic construct
  misc_feature 1..20: note = Description of Artificial Sequence: Synthetic oligonucleotide
  misc_feature 1..20: note = Target: SCN10A; (+) strand; PAM type: YTN; PAM sequence: CTG
  source 1..20: mol_type = other DNA
atctttgacaaacttgacaa

SEQ ID NO: 73490 - DNA, 20 bp, synthetic construct
  misc_feature 1..20: note = Description of Artificial Sequence: Synthetic oligonucleotide
  misc_feature 1..20: note = Target: SCN10A; (+) strand; PAM type: YTN; PAM sequence: CTT
  source 1..20: mol_type = other DNA
tgacaaacttgacaaaagca

SEQ ID NO: 73491 - DNA, 20 bp, synthetic construct
  misc_feature 1..20: note = Description of Artificial Sequence: Synthetic oligonucleotide
  misc_feature 1..20: note = Target: SCN10A; (+) strand; PAM type: YTN; PAM sequence: TTT
  source 1..20: mol_type = other DNA
gacaaacttgacaaaagcaa

SEQ ID NO: 73492 - DNA, 20 bp, synthetic construct
  misc_feature 1..20: note = Description of Artificial Sequence: Synthetic oligonucleotide
  misc_feature 1..20: note = Target: SCN10A; (+) strand; PAM type: YTN; PAM sequence: TTG
  source 1..20: mol_type = other DNA
acaaacttgacaaaagcaag

SEQ ID NO: 73493 - DNA, 20 bp, synthetic construct
  misc_feature 1..20: note = Description of Artificial Sequence: Synthetic oligonucleotide
  misc_feature 1..20: note = Target: SCN10A; (+) strand; PAM type: YTN; PAM sequence: CTT
  source 1..20: mol_type = other DNA
gacaaaagcaagcaatgggg

SEQ ID NO: 73494 - DNA, 20 bp, synthetic construct
  misc_feature 1..20: note = Description of Artificial Sequence: Synthetic oligonucleotide
  misc_feature 1..20: note = Target: SCN10A; (+) strand; PAM type: YTN; PAM sequence: TTG
  source 1..20: mol_type = other DNA
acaaaagcaagcaatgggga

SEQ ID NO: 73495 - DNA, 20 bp, synthetic construct
  misc_feature 1..20: note = Description of Artificial Sequence: Synthetic oligonucleotide
  misc_feature 1..20: note = Target: SCN10A; (+) strand; PAM type: YTN; PAM sequence: TTC
  source 1..20: mol_type = other DNA
cctatttaataaatggtgtg

SEQ ID NO: 73496 - DNA, 20 bp, synthetic construct
  misc_feature 1..20: note = Description of Artificial Sequence: Synthetic oligonucleotide
  misc_feature 1..20: note = Target: SCN10A; (+) strand; PAM type: YTN; PAM sequence: CTA
  source 1..20: mol_type = other DNA
tttaataaatggtgtgggga

SEQ ID NO: 73497 - DNA, 20 bp, synthetic construct
  misc_feature 1..20: note = Description of Artificial Sequence: Synthetic oligonucleotide
  misc_feature 1..20: note = Target: SCN10A; (+) strand; PAM type: YTN; PAM sequence: TTT
  source 1..20: mol_type = other DNA
aataaatggtgtggggaaaa

SEQ ID NO: 73498 - DNA, 20 bp, synthetic construct
  misc_feature 1..20: note = Description of Artificial Sequence: Synthetic oligonucleotide
  misc_feature 1..20: note = Target: SCN10A; (+) strand; PAM type: YTN; PAM sequence: TTA
  source 1..20: mol_type = other DNA
ataaatggtgtggggaaaac

SEQ ID NO: 73499 - DNA, 20 bp, synthetic construct
  misc_feature 1..20: note = Description of Artificial Sequence: Synthetic oligonucleotide
  misc_feature 1..20: note = Target: SCN10A; (+) strand; PAM type: YTN; PAM sequence: CTG
  source 1..20: mol_type = other DNA
gctagccttaggcagaaaat

SEQ ID NO: 73500 - DNA, 20 bp, synthetic construct
  misc_feature 1..20: note = Description of Artificial Sequence: Synthetic oligonucleotide
  misc_feature 1..20: note = Target: SCN10A; (+) strand; PAM type: YTN; PAM sequence: CTA
  source 1..20: mol_type = other DNA
gccttaggcagaaaattgaa

SEQ ID NO: 73501 - DNA, 20 bp, synthetic construct
  misc_feature 1..20: note = Description of Artificial Sequence: Synthetic oligonucleotide
  misc_feature 1..20: note = Target: SCN10A; (+) strand; PAM type: YTN; PAM sequence: CTT
  source 1..20: mol_type = other DNA
aggcagaaaattgaaactag

SEQ ID NO: 73502 - DNA, 20 bp, synthetic construct
  misc_feature 1..20: note = Description of Artificial Sequence: Synthetic oligonucleotide
  misc_feature 1..20: note = Target: SCN10A; (+) strand; PAM type: YTN; PAM sequence: TTA
  source 1..20: mol_type = other DNA
ggcagaaaattgaaactaga

SEQ ID NO: 73503 - DNA, 20 bp, synthetic construct
  misc_feature 1..20: note = Description of Artificial Sequence: Synthetic oligonucleotide
  misc_feature 1..20: note = Target: SCN10A; (+) strand; PAM type: YTN; PAM sequence: TTG
  source 1..20: mol_type = other DNA
aaactagatcccttccttat

SEQ ID NO: 73504 - DNA, 20 bp, synthetic construct
  misc_feature 1..20: note = Description of Artificial Sequence: Synthetic oligonucleotide
  misc_feature 1..20: note = Target: SCN10A; (+) strand; PAM type: YTN; PAM sequence: CTA
  source 1..20: mol_type = other DNA
gatcccttccttatacctta

SEQ ID NO: 73505 - DNA, 20 bp, synthetic construct
  misc_feature 1..20: note = Description of Artificial Sequence: Synthetic oligonucleotide
  misc_feature 1..20: note = Target: SCN10A; (+) strand; PAM type: YTN; PAM sequence: CTT
  source 1..20: mol_type = other DNA
ccttataccttacacaaaaa

SEQ ID NO: 73506 - DNA, 20 bp, synthetic construct
  misc_feature 1..20: note = Description of Artificial Sequence: Synthetic oligonucleotide
  misc_feature 1..20: note = Target: SCN10A; (+) strand; PAM type: YTN; PAM sequence: TTC
  source 1..20: mol_type = other DNA
cttataccttacacaaaaat

SEQ ID NO: 73507 - DNA, 20 bp, synthetic construct
  misc_feature 1..20: note = Description of Artificial Sequence: Synthetic oligonucleotide
  misc_feature 1..20: note = Target: SCN10A; (+) strand; PAM type: YTN; PAM sequence: CTT
  source 1..20: mol_type = other DNA
ataccttacacaaaaattaa

SEQ ID NO: 73508 - DNA, 20 bp, synthetic construct
  misc_feature 1..20: note = Description of Artificial Sequence: Synthetic oligonucleotide
  misc_feature 1..20: note = Target: SCN10A; (+) strand; PAM type: YTN; PAM sequence: TTA
  source 1..20: mol_type = other DNA
taccttacacaaaaattaac

SEQ ID NO: 73509 - DNA, 20 bp, synthetic construct
  misc_feature 1..20: note = Description of Artificial Sequence: Synthetic oligonucleotide
  misc_feature 1..20: note = Target: SCN10A; (+) strand; PAM type: YTN; PAM sequence: CTT
  source 1..20: mol_type = other DNA
acacaaaaattaactcaaga

SEQ ID NO: 73510 - DNA, 20 bp, synthetic construct
  misc_feature 1..20: note = Description of Artificial Sequence: Synthetic oligonucleotide
  misc_feature 1..20: note = Target: SCN10A; (+) strand; PAM type: YTN; PAM sequence: TTA
  source 1..20: mol_type = other DNA
cacaaaaattaactcaagat

SEQ ID NO: 73511 - DNA, 20 bp, synthetic construct
  misc_feature 1..20: note = Description of Artificial Sequence: Synthetic oligonucleotide
  misc_feature 1..20: note = Target: SCN10A; (+) strand; PAM type: YTN; PAM sequence: TTA
  source 1..20: mol_type = other DNA
actcaagatagattaaagac

SEQ ID NO: 73512 - DNA, 20 bp, synthetic construct
  misc_feature 1..20: note = Description of Artificial Sequence: Synthetic oligonucleotide
  misc_feature 1..20: note = Target: SCN10A; (+) strand; PAM type: YTN; PAM sequence: CTC
  source 1..20: mol_type = other DNA
aagatagattaaagacttaa

SEQ ID NO: 73513 - DNA, 20 bp, synthetic construct
  misc_feature 1..20: note = Description of Artificial Sequence: Synthetic oligonucleotide
  misc_feature 1..20: note = Target: SCN10A; (+) strand; PAM type: YTN; PAM sequence: TTA
  source 1..20: mol_type = other DNA
aagacttaaacataagacct

SEQ ID NO: 73514 - DNA, 20 bp, synthetic construct
  misc_feature 1..20: note = Description of Artificial Sequence: Synthetic oligonucleotide
  misc_feature 1..20: note = Target: SCN10A; (+) strand; PAM type: YTN; PAM sequence: CTT
  source 1..20: mol_type = other DNA
aaacataagacctaaaacca

SEQ ID NO: 73515 - DNA, 20 bp, synthetic construct
  misc_feature 1..20: note = Description of Artificial Sequence: Synthetic oligonucleotide
  misc_feature 1..20: note = Target: SCN10A; (+) strand; PAM type: YTN; PAM sequence: TTA
  source 1..20: mol_type = other DNA
aacataagacctaaaaccat

SEQ ID NO: 73516 - DNA, 20 bp, synthetic construct
  misc_feature 1..20: note = Description of Artificial Sequence: Synthetic oligonucleotide
  misc_feature 1..20: note = Target: SCN10A; (+) strand; PAM type: YTN; PAM sequence: CTA
  source 1..20: mol_type = other DNA
aaaccataaaaaccctagaa

SEQ ID NO: 73517 - DNA, 20 bp, synthetic construct
  misc_feature 1..20: note = Description of Artificial Sequence: Synthetic oligonucleotide
  misc_feature 1..20: note = Target: SCN10A; (+) strand; PAM type: YTN; PAM sequence: CTA
  source 1..20: mol_type = other DNA
gaagaaaacctaggcaatac

SEQ ID NO: 73518 - DNA, 20 bp, synthetic construct
  misc_feature 1..20: note = Description of Artificial Sequence: Synthetic oligonucleotide
  misc_feature 1..20: note = Target: SCN10A; (+) strand; PAM type: YTN; PAM sequence: CTA
  source 1..20: mol_type = other DNA
ggcaatacccttcaggacat

SEQ ID NO: 73519 - DNA, 20 bp, synthetic construct
  misc_feature 1..20: note = Description of Artificial Sequence: Synthetic oligonucleotide
  misc_feature 1..20: note = Target: SCN10A; (+) strand; PAM type: YTN; PAM sequence: CTT
  source 1..20: mol_type = other DNA
caggacataggcatgggcaa

SEQ ID NO: 73520 - DNA, 20 bp, synthetic construct
  misc_feature 1..20: note = Description of Artificial Sequence: Synthetic oligonucleotide
  misc_feature 1..20: note = Target: SCN10A; (+) strand; PAM type: YTN; PAM sequence: TTC
  source 1..20: mol_type = other DNA
aggacataggcatgggcaaa

SEQ ID NO: 73521 - DNA, 20 bp, synthetic construct
  misc_feature 1..20: note = Description of Artificial Sequence: Synthetic oligonucleotide
  misc_feature 1..20: note = Target: SCN10A; (+) strand; PAM type: YTN; PAM sequence: CTT
  source 1..20: mol_type = other DNA
tatgactaacacatcaaaag

SEQ ID NO: 73522 - DNA, 20 bp, synthetic construct
  misc_feature 1..20: note = Description of Artificial Sequence: Synthetic oligonucleotide
  misc_feature 1..20: note = Target: SCN10A; (+) strand; PAM type: YTN; PAM sequence: TTT
  source 1..20: mol_type = other DNA
atgactaacacatcaaaagc

SEQ ID NO: 73523 - DNA, 20 bp, synthetic construct
  misc_feature 1..20: note = Description of Artificial Sequence: Synthetic oligonucleotide
  misc_feature 1..20: note = Target: SCN10A; (+) strand; PAM type: YTN; PAM sequence: TTA
  source 1..20: mol_type = other DNA
tgactaacacatcaaaagca

SEQ ID NO: 73524 - DNA, 20 bp, synthetic construct
  misc_feature 1..20: note = Description of Artificial Sequence: Synthetic oligonucleotide
  misc_feature 1..20: note = Target: SCN10A; (+) strand; PAM type: YTN; PAM sequence: CTA
  source 1..20: mol_type = other DNA
acacatcaaaagcaatggtg

SEQ ID NO: 73525 - DNA, 20 bp, synthetic construct
  misc_feature 1..20: note = Description of Artificial Sequence: Synthetic oligonucleotide
  misc_feature 1..20: note = Target: SCN10A; (+) strand; PAM type: YTN; PAM sequence: TTG
  source 1..20: mol_type = other DNA
acaaatggaatccaattaaa

SEQ ID NO: 73526 - DNA, 20 bp, synthetic construct
  misc_feature 1..20: note = Description of Artificial Sequence: Synthetic oligonucleotide
  misc_feature 1..20: note = Target: SCN10A; (+) strand; PAM type: YTN; PAM sequence: TTA
  source 1..20: mol_type = other DNA
aactaaagagcttctgcaca

SEQ ID NO: 73527 - DNA, 20 bp, synthetic construct
  misc_feature 1..20: note = Description of Artificial Sequence: Synthetic oligonucleotide
  misc_feature 1..20: note = Target: SCN10A; (+) strand; PAM type: YTN; PAM sequence: CTA
  source 1..20: mol_type = other DNA
aagagcttctgcacagcaaa

SEQ ID NO: 73528 - DNA, 20 bp, synthetic construct
  misc_feature 1..20: note = Description of Artificial Sequence: Synthetic oligonucleotide
  misc_feature 1..20: note = Target: SCN10A; (+) strand; PAM type: YTN; PAM sequence: CTT
  source 1..20: mol_type = other DNA
ctgcacagcaaaagaaacta

SEQ ID NO: 73529 - DNA, 20 bp, synthetic construct
  misc_feature 1..20: note = Description of Artificial Sequence: Synthetic oligonucleotide
  misc_feature 1..20: note = Target: SCN10A; (+) strand; PAM type: YTN; PAM sequence: TTC
  source 1..20: mol_type = other DNA
tgcacagcaaaagaaactat

SEQ ID NO: 73530 - DNA, 20 bp, synthetic construct
  misc_feature 1..20: note = Description of Artificial Sequence: Synthetic oligonucleotide
  misc_feature 1..20: note = Target: SCN10A; (+) strand; PAM type: YTN; PAM sequence: CTG
  source 1..20: mol_type = other DNA
cacagcaaaagaaactatca

SEQ ID NO: 73531 - DNA, 20 bp, synthetic construct
  misc_feature 1..20: note = Description of Artificial Sequence: Synthetic oligonucleotide
  misc_feature 1..20: note = Target: SCN10A; (+) strand; PAM type: YTN; PAM sequence: CTA
  source 1..20: mol_type = other DNA
tcatcagagtgaataggtaa

SEQ ID NO: 73532 - DNA, 20 bp, synthetic construct
  misc_feature 1..20: note = Description of Artificial Sequence: Synthetic oligonucleotide
  misc_feature 1..20: note = Target: SCN10A; (+) strand; PAM type: YTN; PAM sequence: CTA
  source 1..20: mol_type = other DNA
cagaatgggagaaaattttt

SEQ ID NO: 73533 - DNA, 20 bp, synthetic construct
  misc_feature 1..20: note = Description of Artificial Sequence: Synthetic oligonucleotide
  misc_feature 1..20: note = Target: SCN10A; (+) strand; PAM type: YTN; PAM sequence: TTT
  source 1..20: mol_type = other DNA
ttgcaatctatcaatctgac

SEQ ID NO: 73534 - DNA, 20 bp, synthetic construct
  misc_feature 1..20: note = Description of Artificial Sequence: Synthetic oligonucleotide
  misc_feature 1..20: note = Target: SCN10A; (+) strand; PAM type: YTN; PAM sequence: TTT
  source 1..20: mol_type = other DNA
tgcaatctatcaatctgaca

SEQ ID NO: 73535 - DNA, 20 bp, synthetic construct
  misc_feature 1..20: note = Description of Artificial Sequence: Synthetic oligonucleotide
  misc_feature 1..20: note = Target: SCN10A; (+) strand; PAM type: YTN; PAM sequence: TTT
  source 1..20: mol_type = other DNA
gcaatctatcaatctgacaa

SEQ ID NO: 73536 - DNA, 20 bp, synthetic construct
  misc_feature 1..20: note = Description of Artificial Sequence: Synthetic oligonucleotide
  misc_feature 1..20: note = Target: SCN10A; (+) strand; PAM type: YTN; PAM sequence: TTG
  source 1..20: mol_type = other DNA
caatctatcaatctgacaaa

SEQ ID NO: 73537 - DNA, 20 bp, synthetic construct
  misc_feature 1..20: note = Description of Artificial Sequence: Synthetic oligonucleotide
  misc_feature 1..20: note = Target: SCN10A; (+) strand; PAM type: YTN; PAM sequence: CTA
  source 1..20: mol_type = other DNA
tcaatctgacaaagggctaa

SEQ ID NO: 73538 - DNA, 20 bp, synthetic construct
  misc_feature 1..20: note = Description of Artificial Sequence: Synthetic oligonucleotide
  misc_feature 1..20: note = Target: SCN10A; (+) strand; PAM type: YTN; PAM sequence: CTG
  source 1..20: mol_type = other DNA
acaaagggctaatatccaga

SEQ ID NO: 73539 - DNA, 20 bp, synthetic construct
  misc_feature 1..20: note = Description of Artificial Sequence: Synthetic oligonucleotide
  misc_feature 1..20: note = Target: SCN10A; (+) strand; PAM type: YTN; PAM sequence: CTA
  source 1..20: mol_type = other DNA
atatccagaatctacaaaaa

SEQ ID NO: 73540 - DNA, 20 bp, synthetic construct
  misc_feature 1..20: note = Description of Artificial Sequence: Synthetic oligonucleotide
  misc_feature 1..20: note = Target: SCN10A; (+) strand; PAM type: YTN; PAM sequence: CTA
  source 1..20: mol_type = other DNA
caaaaaacttaaacaaattt

SEQ ID NO: 73541 - DNA, 20 bp, synthetic construct
  misc_feature 1..20: note = Description of Artificial Sequence: Synthetic oligonucleotide
  misc_feature 1..20: note = Target: SCN10A; (+) strand; PAM type: YTN; PAM sequence: CTT
  source 1..20: mol_type = other DNA
aaacaaatttacaagaaaaa

SEQ ID NO: 73542 - DNA, 20 bp, synthetic construct
  misc_feature 1..20: note = Description of Artificial Sequence: Synthetic oligonucleotide
  misc_feature 1..20: note = Target: SCN10A; (+) strand; PAM type: YTN; PAM sequence: TTA
  source 1..20: mol_type = other DNA
aacaaatttacaagaaaaaa

SEQ ID NO: 73543 - DNA, 20 bp, synthetic construct
  misc_feature 1..20: note = Description of Artificial Sequence: Synthetic oligonucleotide
  misc_feature 1..20: note = Target: SCN10A; (+) strand; PAM type: YTN; PAM sequence: TTT
  source 1..20: mol_type = other DNA
acaagaaaaaacaactccat

SEQ ID NO: 73544 - DNA, 20 bp, synthetic construct
  misc_feature 1..20: note = Description of Artificial Sequence: Synthetic oligonucleotide
  misc_feature 1..20: note = Target: SCN10A; (+) strand; PAM type: YTN; PAM sequence: TTA
  source 1..20: mol_type = other DNA
caagaaaaaacaactccatc

SEQ ID NO: 73545 - DNA, 20 bp, synthetic construct
  misc_feature 1..20: note = Description of Artificial Sequence: Synthetic oligonucleotide
  misc_feature 1..20: note = Target: SCN10A; (+) strand; PAM type: YTN; PAM sequence: CTC
  source 1..20: mol_type = other DNA
catcaaaaagtgggcaaagg

SEQ ID NO: 73546 - DNA, 20 bp, synthetic construct
  misc_feature 1..20: note = Description of Artificial Sequence: Synthetic oligonucleotide
  misc_feature 1..20: note = Target: SCN10A; (+) strand; PAM type: YTN; PAM sequence: CTT
  source 1..20: mol_type = other DNA
ctcaaaagaagacatttatg

SEQ ID NO: 73547 - DNA, 20 bp, synthetic construct
  misc_feature 1..20: note = Description of Artificial Sequence: Synthetic oligonucleotide
  misc_feature 1..20: note = Target: SCN10A; (+) strand; PAM type: YTN; PAM sequence: TTC
  source 1..20: mol_type = other DNA
tcaaaagaagacatttatgc

SEQ ID NO: 73548 - DNA, 20 bp, synthetic construct
  misc_feature 1..20: note = Description of Artificial Sequence: Synthetic oligonucleotide
  misc_feature 1..20: note = Target: SCN10A; (+) strand; PAM type: YTN; PAM sequence: CTC
  source 1..20: mol_type = other DNA
aaaagaagacatttatgcag

SEQ ID NO: 73549 - DNA, 20 bp, synthetic construct
  misc_feature 1..20: note = Description of Artificial Sequence: Synthetic oligonucleotide
  misc_feature 1..20: note = Target: SCN10A; (+) strand; PAM type: YTN; PAM sequence: TTT
  source 1..20: mol_type = other DNA
atgcagccaataaacatatg

SEQ ID NO: 73550 - DNA, 20 bp, synthetic construct
  misc_feature 1..20: note = Description of Artificial Sequence: Synthetic oligonucleotide
  misc_feature 1..20: note = Target: SCN10A; (+) strand; PAM type: YTN; PAM sequence: TTA
  source 1..20: mol_type = other DNA
tgcagccaataaacatatga

SEQ ID NO: 73551 - DNA, 20 bp, synthetic construct
  misc_feature 1..20: note = Description of Artificial Sequence: Synthetic oligonucleotide
  misc_feature 1..20: note = Target: SCN10A; (+) strand; PAM type: YTN; PAM sequence: CTC
  source 1..20: mol_type = other DNA
atcatcactggtcattagag

SEQ ID NO: 73552 - DNA, 20 bp, synthetic construct
  misc_feature 1..20: note = Description of Artificial Sequence: Synthetic oligonucleotide
  misc_feature 1..20: note = Target: SCN10A; (+) strand; PAM type: YTN; PAM sequence: CTG
  source 1..20: mol_type = other DNA
gtcattagagaaatgccagt

SEQ ID NO: 73553 - DNA, 20 bp, synthetic construct
  misc_feature 1..20: note = Description of Artificial Sequence: Synthetic oligonucleotide
  misc_feature 1..20: note = Target: SCN10A; (+) strand; PAM type: YTN; PAM sequence: TTA
  source 1..20: mol_type = other DNA
gagaaatgccagtcaaaacc

SEQ ID NO: 73554 - DNA, 20 bp, synthetic construct
  misc_feature 1..20: note = Description of Artificial Sequence: Synthetic oligonucleotide
  misc_feature 1..20: note = Target: SCN10A; (+) strand; PAM type: YTN; PAM sequence: CTC
  source 1..20: mol_type = other DNA
ataccagttagaatggagat

SEQ ID NO: 73555 - DNA, 20 bp, synthetic construct
  misc_feature 1..20: note = Description of Artificial Sequence: Synthetic oligonucleotide
  misc_feature 1..20: note = Target: SCN10A; (+) strand; PAM type: YTN; PAM sequence: TTA
  source 1..20: mol_type = other DNA
gaatggagatcattaaaaag

SEQ ID NO: 73556 - DNA, 20 bp, synthetic construct
  misc_feature 1..20: note = Description of Artificial Sequence: Synthetic oligonucleotide
  misc_feature 1..20: note = Target: SCN10A; (+) strand; PAM type: YTN; PAM sequence: TTA
  source 1..20: mol_type = other DNA
aaaagtcaggaaacaacaga

SEQ ID NO: 73557 - DNA, 20 bp, synthetic construct
  misc_feature 1..20: note = Description of Artificial Sequence: Synthetic oligonucleotide
  misc_feature 1..20: note = Target: SCN10A; (+) strand; PAM type: YTN; PAM sequence: CTG
  source 1..20: mol_type = other DNA
gagaggatgtggagagatag

SEQ ID NO: 73558 - DNA, 20 bp, synthetic construct
  misc_feature 1..20: note = Description of Artificial Sequence: Synthetic oligonucleotide
  misc_feature 1..20: note = Target: SCN10A; (+) strand; PAM type: YTN; PAM sequence: CTT
  source 1..20: mol_type = other DNA
ttacactgttggtgggagtg

SEQ ID NO: 73559 - DNA, 20 bp, synthetic construct
  misc_feature 1..20: note = Description of Artificial Sequence: Synthetic oligonucleotide
  misc_feature 1..20: note = Target: SCN10A; (+) strand; PAM type: YTN; PAM sequence: TTT
  source 1..20: mol_type = other DNA
tacactgttggtgggagtgt

SEQ ID NO: 73560 - DNA, 20 bp, synthetic construct
  misc_feature 1..20: note = Description of Artificial Sequence: Synthetic oligonucleotide
  misc_feature 1..20: note = Target: SCN10A; (+) strand; PAM type: YTN; PAM sequence: TTT
  source 1..20: mol_type = other DNA
acactgttggtgggagtgta

SEQ ID NO: 73561 - DNA, 20 bp, synthetic construct
  misc_feature 1..20: note = Description of Artificial Sequence: Synthetic oligonucleotide
  misc_feature 1..20: note = Target: SCN10A; (+) strand; PAM type: YTN; PAM sequence: TTA
  source 1..20: mol_type = other DNA
cactgttggtgggagtgtaa

SEQ ID NO: 73562 - DNA, 20 bp, synthetic construct
  misc_feature 1..20: note = Description of Artificial Sequence: Synthetic oligonucleotide
  misc_feature 1..20: note = Target: SCN10A; (+) strand; PAM type: YTN; PAM sequence: CTG
  source 1..20: mol_type = other DNA
ttggtgggagtgtaaattag

SEQ ID NO: 73563 - DNA, 20 bp, synthetic construct
  misc_feature 1..20: note = Description of Artificial Sequence: Synthetic oligonucleotide
  misc_feature 1..20: note = Target: SCN10A; (+) strand; PAM type: YTN; PAM sequence: TTG
  source 1..20: mol_type = other DNA
gtgggagtgtaaattagttc

SEQ ID NO: 73564 - DNA, 20 bp, synthetic construct
  misc_feature 1..20: note = Description of Artificial Sequence: Synthetic oligonucleotide
  misc_feature 1..20: note = Target: SCN10A; (+) strand; PAM type: YTN; PAM sequence: TTA
  source 1..20: mol_type = other DNA
gttcaaccattgtggaagac

SEQ ID NO: 73565 - DNA, 20 bp, synthetic construct
  misc_feature 1..20: note = Description of Artificial Sequence: Synthetic oligonucleotide
  misc_feature 1..20: note = Target: SCN10A; (+) strand; PAM type: YTN; PAM sequence: TTC
  source 1..20: mol_type = other DNA
aaccattgtggaagacagtg

SEQ ID NO: 73566 - DNA, 20 bp, synthetic construct
  misc_feature 1..20: note = Description of Artificial Sequence: Synthetic oligonucleotide
  misc_feature 1..20: note = Target: SCN10A; (+) strand; PAM type: YTN; PAM sequence: TTG
  source 1..20: mol_type = other DNA
tggaagacagtgtggtgatt

SEQ ID NO: 73567 - DNA, 20 bp, synthetic construct
  misc_feature 1..20: note = Description of Artificial Sequence: Synthetic oligonucleotide
  misc_feature 1..20: note = Target: SCN10A; (+) strand; PAM type: YTN; PAM sequence: TTC
  source 1..20: mol_type = other DNA
ctcaaggatctagaaccaga

SEQ ID NO: 73568 - DNA, 20 bp, synthetic construct
  misc_feature 1..20: note = Description of Artificial Sequence: Synthetic oligonucleotide
  misc_feature 1..20: note = Target: SCN10A; (+) strand; PAM type: YTN; PAM sequence: CTC
  source 1..20: mol_type = other DNA
aaggatctagaaccagaaac

SEQ ID NO: 73569 - DNA, 20 bp, synthetic construct
  misc_feature 1..20: note = Description of Artificial Sequence: Synthetic oligonucleotide
  misc_feature 1..20: note = Target: SCN10A; (+) strand; PAM type: YTN; PAM sequence: CTA
  source 1..20: mol_type = other DNA
gaaccagaaacaccatttga

SEQ ID NO: 73570 - DNA, 20 bp, synthetic construct
  misc_feature 1..20: note = Description of Artificial Sequence: Synthetic oligonucleotide
  misc_feature 1..20: note = Target: SCN10A; (+) strand; PAM type: YTN; PAM sequence: TTT
  source 1..20: mol_type = other DNA
gacccagcaattccattact

SEQ ID NO: 73571 - DNA, 20 bp, synthetic construct
  misc_feature 1..20: note = Description of Artificial Sequence: Synthetic oligonucleotide
  misc_feature 1..20: note = Target: SCN10A; (+) strand; PAM type: YTN; PAM sequence: TTG
  source 1..20: mol_type = other DNA
acccagcaattccattactg

SEQ ID NO: 73572 - DNA, 20 bp, synthetic construct
  misc_feature 1..20: note = Description of Artificial Sequence: Synthetic oligonucleotide
  misc_feature 1..20: note = Target: SCN10A; (+) strand; PAM type: YTN; PAM sequence: TTC
  source 1..20: mol_type = other DNA
cattactgggtatataccca

SEQ ID NO: 73573 - DNA, 20 bp, synthetic construct
  misc_feature 1..20: note = Description of Artificial Sequence: Synthetic oligonucleotide
  misc_feature 1..20: note = Target: SCN10A; (+) strand; PAM type: YTN; PAM sequence: TTA
  source 1..20: mol_type = other DNA
ctgggtatatacccaaagga

SEQ ID NO: 73574 - DNA, 20 bp, synthetic construct
  misc_feature 1..20: note = Description of Artificial Sequence: Synthetic oligonucleotide
  misc_feature 1..20: note = Target: SCN10A; (+) strand; PAM type: YTN; PAM sequence: CTG
  source 1..20: mol_type = other DNA
ggtatatacccaaaggatta

SEQ ID NO: 73575 - DNA, 20 bp, synthetic construct
  misc_feature 1..20: note = Description of Artificial Sequence: Synthetic oligonucleotide
  misc_feature 1..20: note = Target: SCN10A; (+) strand; PAM type: YTN; PAM sequence: TTA
  source 1..20: mol_type = other DNA
taaattattctactataaag

SEQ ID NO: 73576 - DNA, 20 bp, synthetic construct
  misc_feature 1..20: note = Description of Artificial Sequence: Synthetic oligonucleotide
  misc_feature 1..20: note = Target: SCN10A; (+) strand; PAM type: YTN; PAM sequence: TTA
  source 1..20: mol_type = other DNA
ttctactataaagatacaag

SEQ ID NO: 73577 - DNA, 20 bp, synthetic construct
  misc_feature 1..20: note = Description of Artificial Sequence: Synthetic oligonucleotide
  misc_feature 1..20: note = Target: SCN10A; (+) strand; PAM type: YTN; PAM sequence: TTC
  source 1..20: mol_type = other DNA
tactataaagatacaagcat

SEQ ID NO: 73578 - DNA, 20 bp, synthetic construct
  misc_feature 1..20: note = Description of Artificial Sequence: Synthetic oligonucleotide
  misc_feature 1..20: note = Target: SCN10A; (+) strand; PAM type: YTN; PAM sequence: CTA
  source 1..20: mol_type = other DNA
ctataaagatacaagcatgc

SEQ ID NO: 73579 - DNA, 20 bp, synthetic construct
  misc_feature 1..20: note = Description of Artificial Sequence: Synthetic oligonucleotide
  misc_feature 1..20: note = Target: SCN10A; (+) strand; PAM type: YTN; PAM sequence: CTA
  source 1..20: mol_type = other DNA
taaagatacaagcatgcgta

SEQ ID NO: 73580 - DNA, 20 bp, synthetic construct
  misc_feature 1..20: note = Description of Artificial Sequence: Synthetic oligonucleotide
  misc_feature 1..20: note = Target: SCN10A; (+) strand; PAM type: YTN; PAM sequence: TTT
  source 1..20: mol_type = other DNA
attgtggcactattgacaat

SEQ ID NO: 73581 - DNA, 20 bp, synthetic construct
  misc_feature 1..20: note = Description of Artificial Sequence: Synthetic oligonucleotide
  misc_feature 1..20: note = Target: SCN10A; (+) strand; PAM type: YTN; PAM sequence: TTA
  source 1..20: mol_type = other DNA
ttgtggcactattgacaata

SEQ ID NO: 73582 - DNA, 20 bp, synthetic construct
  misc_feature 1..20: note = Description of Artificial Sequence: Synthetic oligonucleotide
  misc_feature 1..20: note = Target: SCN10A; (+) strand; PAM type: YTN; PAM sequence: TTG
  source 1..20: mol_type = other DNA
tggcactattgacaatagca

SEQ ID NO: 73583 - DNA, 20 bp, synthetic construct
  misc_feature 1..20: note = Description of Artificial Sequence: Synthetic oligonucleotide
  misc_feature 1..20: note = Target: SCN10A; (+) strand; PAM type: YTN; PAM sequence: CTA
  source 1..20: mol_type = other DNA
ttgacaatagcaaagacttg

SEQ ID NO: 73584 - DNA, 20 bp, synthetic construct
  misc_feature 1..20: note = Description of Artificial Sequence: Synthetic oligonucleotide
  misc_feature 1..20: note = Target: SCN10A; (+) strand; PAM type: YTN; PAM sequence: TTG
  source 1..20: mol_type = other DNA
acaatagcaaagacttggaa

SEQ ID NO: 73585 - DNA, 20 bp, synthetic construct
  misc_feature 1..20: note = Description of Artificial Sequence: Synthetic oligonucleotide
  misc_feature 1..20: note = Target: SCN10A; (+) strand; PAM type: YTN; PAM sequence: CTT
  source 1..20: mol_type = other DNA
ggaactaacccaaacgccca

SEQ ID NO: 73586 - DNA, 20 bp, synthetic construct
  misc_feature 1..20: note = Description of Artificial Sequence: Synthetic oligonucleotide
  misc_feature 1..20: note = Target: SCN10A; (+) strand; PAM type: YTN; PAM sequence: TTG
  source 1..20: mol_type = other DNA
gaactaacccaaacgcccat

SEQ ID NO: 73587 - DNA, 20 bp, synthetic construct
  misc_feature 1..20: note = Description of Artificial Sequence: Synthetic oligonucleotide
  misc_feature 1..20: note = Target: SCN10A; (+) strand; PAM type: YTN; PAM sequence: CTA
  source 1..20: mol_type = other DNA
acccaaacgcccatcagtga

SEQ ID NO: 73588 - DNA, 20 bp, synthetic construct
  misc_feature 1..20: note = Description of Artificial Sequence: Synthetic oligonucleotide
  misc_feature 1..20: note = Target: SCN10A; (+) strand; PAM type: YTN; PAM sequence: CTG
  source 1..20: mol_type = other DNA
gataaagaaaatatggcaca

SEQ ID NO: 73589 - DNA, 20 bp, synthetic construct
  misc_feature 1..20: note = Description of Artificial Sequence: Synthetic oligonucleotide
  misc_feature 1..20: note = Target: SCN10A; (+) strand; PAM type: YTN; PAM sequence: CTA
  source 1..20: mol_type = other DNA
tgcagccataaaaaagggtg

SEQ ID NO: 73590 - DNA, 20 bp, synthetic construct
  misc_feature 1..20: note = Description of Artificial Sequence: Synthetic oligonucleotide
  misc_feature 1..20: note = Target: SCN10A; (+) strand; PAM type: YTN; PAM sequence: TTC
  source 1..20: mol_type = other DNA
atgttctttgcagggacatg

SEQ ID NO: 73591 - DNA, 20 bp, synthetic construct
  misc_feature 1..20: note = Description of Artificial Sequence: Synthetic oligonucleotide
  misc_feature 1..20: note = Target: SCN10A; (+) strand; PAM type: YTN; PAM sequence: TTC
  source 1..20: mol_type = other DNA
tttgcagggacatggatgaa

SEQ ID NO: 73592 - DNA, 20 bp, synthetic construct
  misc_feature 1..20: note = Description of Artificial Sequence: Synthetic oligonucleotide
  misc_feature 1..20: note = Target: SCN10A; (+) strand; PAM type: YTN; PAM sequence: CTT
  source 1..20: mol_type = other DNA
tgcagggacatggatgaagc

SEQ ID NO: 73593 - DNA, 20 bp, synthetic construct
  misc_feature 1..20: note = Description of Artificial Sequence: Synthetic oligonucleotide
  misc_feature 1..20: note = Target: SCN10A; (+) strand; PAM type: YTN; PAM sequence: TTT
  source 1..20: mol_type = other DNA
gcagggacatggatgaagct

SEQ ID NO: 73594 - DNA, 20 bp, synthetic construct
  misc_feature 1..20: note = Description of Artificial Sequence: Synthetic oligonucleotide
  misc_feature 1..20: note = Target: SCN10A; (+) strand; PAM type: YTN; PAM sequence: TTG
  source 1..20: mol_type = other DNA
cagggacatggatgaagctg

SEQ ID NO: 73595 - DNA, 20 bp, synthetic construct
  misc_feature 1..20: note = Description of Artificial Sequence: Synthetic oligonucleotide
  misc_feature 1..20: note = Target: SCN10A; (+) strand; PAM type: YTN; PAM sequence: CTG
  source 1..20: mol_type = other DNA
gaaaccatcattctcagcaa

SEQ ID NO: 73596 - DNA, 20 bp, synthetic construct
  misc_feature 1..20: note = Description of Artificial Sequence: Synthetic oligonucleotide
  misc_feature 1..20: note = Target: SCN10A; (+) strand; PAM type: YTN; PAM sequence: TTC
  source 1..20: mol_type = other DNA
tcagcaaactgacataagaa

SEQ ID NO: 73597 - DNA, 20 bp, synthetic construct
  misc_feature 1..20: note = Description of Artificial Sequence: Synthetic oligonucleotide
  misc_feature 1..20: note = Target: SCN10A; (+) strand; PAM type: YTN; PAM sequence: CTC
  source 1..20: mol_type = other DNA
agcaaactgacataagaaca

SEQ ID NO: 73598 - DNA, 20 bp, synthetic construct
  misc_feature 1..20: note = Description of Artificial Sequence: Synthetic oligonucleotide
  misc_feature 1..20: note = Target: SCN10A; (+) strand; PAM type: YTN; PAM sequence: CTG
  source 1..20: mol_type = other DNA
acataagaacagaaaaccaa

SEQ ID NO: 73599 - DNA, 20 bp, synthetic construct
  misc_feature 1..20: note = Description of Artificial Sequence: Synthetic oligonucleotide
  misc_feature 1..20: note = Target: SCN10A; (+) strand; PAM type: YTN; PAM sequence: TTC
  source 1..20: mol_type = other DNA
tcactcataggtgggagatg

SEQ ID NO: 73600 - DNA, 20 bp, synthetic construct
  misc_feature 1..20: note = Description of Artificial Sequence: Synthetic oligonucleotide
  misc_feature 1..20: note = Target: SCN10A; (+) strand; PAM type: YTN; PAM sequence: CTC
  source 1..20: mol_type = other DNA
actcataggtgggagatgaa

SEQ ID NO: 73601 - DNA, 20 bp, synthetic construct
  misc_feature 1..20: note = Description of Artificial Sequence: Synthetic oligonucleotide
  misc_feature 1..20: note = Target: SCN10A; (+) strand; PAM type: YTN; PAM sequence: CTC
  source 1..20: mol_type = other DNA
ataggtgggagatgaacaat

SEQ ID NO: 73602 - DNA, 20 bp, synthetic construct
  misc_feature 1..20: note = Description of Artificial Sequence: Synthetic oligonucleotide
  misc_feature 1..20: note = Target: SCN10A; (+) strand; PAM type: YTN; PAM sequence: CTG
  source 1..20: mol_type = other DNA
ttgaggggttgggggctagg

SEQ ID NO: 73603 - DNA, 20 bp, synthetic construct
  misc_feature 1..20: note = Description of Artificial Sequence: Synthetic oligonucleotide
  misc_feature 1..20: note = Target: SCN10A; (+) strand; PAM type: YTN; PAM sequence: TTG
  source 1..20: mol_type = other DNA
aggggttgggggctagggga

SEQ ID NO: 73604 - DNA, 20 bp, synthetic construct
  misc_feature 1..20: note = Description of Artificial Sequence: Synthetic oligonucleotide
  misc_feature 1..20: note = Target: SCN10A; (+) strand; PAM type: YTN; PAM sequence: TTG
  source 1..20: mol_type = other DNA
ggggctaggggagggatagc

SEQ ID NO: 73605 - DNA, 20 bp, synthetic construct
  misc_feature 1..20: note = Description of Artificial Sequence: Synthetic oligonucleotide
  misc_feature 1..20: note = Target: SCN10A; (+) strand; PAM type: YTN; PAM sequence: CTA
  source 1..20: mol_type = other DNA
ggggagggatagcattagga

SEQ ID NO: 73606 - DNA, 20 bp, synthetic construct
  misc_feature 1..20: note = Description of Artificial Sequence: Synthetic oligonucleotide
  misc_feature 1..20: note = Target: SCN10A; (+) strand; PAM type: YTN; PAM sequence: TTA
  source 1..20: mol_type = other DNA
ggagaaatacctaatgtaga

SEQ ID NO: 73607 - DNA, 20 bp, synthetic construct
  misc_feature 1..20: note = Description of Artificial Sequence: Synthetic oligonucleotide
  misc_feature 1..20: note = Target: SCN10A; (+) strand; PAM type: YTN; PAM sequence: CTA
  source 1..20: mol_type = other DNA
atgtagatgatgggttgatg

SEQ ID NO: 73608 - DNA, 20 bp, synthetic construct
  misc_feature 1..20: note = Description of Artificial Sequence: Synthetic oligonucleotide
  misc_feature 1..20: note = Target: SCN10A; (+) strand; PAM type: YTN; PAM sequence: TTG
  source 1..20: mol_type = other DNA
atgggtgcagcaaaccacca

SEQ ID NO: 73609 - DNA, 20 bp, synthetic construct
  misc_feature 1..20: note = Description of Artificial Sequence: Synthetic oligonucleotide
  misc_feature 1..20: note = Target: SCN10A; (+) strand; PAM type: YTN; PAM sequence: CTA
  source 1..20: mol_type = other DNA
tgtaacaaacctgcactttc

SEQ ID NO: 73610 - DNA, 20 bp, synthetic construct
  misc_feature 1..20: note = Description of Artificial Sequence: Synthetic oligonucleotide
  misc_feature 1..20: note = Target: SCN10A; (+) strand; PAM type: YTN; PAM sequence: CTG
  source 1..20: mol_type = other DNA
cactttctgcacatgtaccc

SEQ ID NO: 73611 - DNA, 20 bp, synthetic construct
  misc_feature 1..20: note = Description of Artificial Sequence: Synthetic oligonucleotide
  misc_feature 1..20: note = Target: SCN10A; (+) strand; PAM type: YTN; PAM sequence: CTT
  source 1..20: mol_type = other DNA
tctgcacatgtaccccagaa

SEQ ID NO: 73612 - DNA, 20 bp, synthetic construct
  misc_feature 1..20: note = Description of Artificial Sequence: Synthetic oligonucleotide
  misc_feature 1..20: note = Target: SCN10A; (+) strand; PAM type: YTN; PAM sequence: TTT
  source 1..20: mol_type = other DNA
ctgcacatgtaccccagaac

SEQ ID NO: 73613 - DNA, 20 bp, synthetic construct
  misc_feature 1..20: note = Description of Artificial Sequence: Synthetic oligonucleotide
  misc_feature 1..20: note = Target: SCN10A; (+) strand; PAM type: YTN; PAM sequence: TTC
  source 1..20: mol_type = other DNA
tgcacatgtaccccagaact

SEQ ID NO: 73614 - DNA, 20 bp, synthetic construct
  misc_feature 1..20: note = Description of Artificial Sequence: Synthetic oligonucleotide
  misc_feature 1..20: note = Target: SCN10A; (+) strand; PAM type: YTN; PAM sequence: CTG
  source 1..20: mol_type = other DNA
cacatgtaccccagaactta

SEQ ID NO: 73615 - DNA, 20 bp, synthetic construct
  misc_feature 1..20: note = Description of Artificial Sequence: Synthetic oligonucleotide
  misc_feature 1..20: note = Target: SCN10A; (+) strand; PAM type: YTN; PAM sequence: CTT
  source 1..20: mol_type = other DNA
aaagtaaaatttaaaaaagg

SEQ ID NO: 73616 - DNA, 20 bp, synthetic construct
  misc_feature 1..20: note = Description of Artificial Sequence: Synthetic oligonucleotide
  misc_feature 1..20: note = Target: SCN10A; (+) strand; PAM type: YTN; PAM sequence: TTA
  source 1..20: mol_type = other DNA
aagtaaaatttaaaaaaggg

SEQ ID NO: 73617 - DNA, 20 bp, synthetic construct
  misc_feature 1..20: note = Description of Artificial Sequence: Synthetic oligonucleotide
  misc_feature 1..20: note = Target: SCN10A; (+) strand; PAM type: YTN; PAM sequence: TTT
  source 1..20: mol_type = other DNA
aaaaaagggctttatatatt

SEQ ID NO: 73618 - DNA, 20 bp, synthetic construct
  misc_feature 1..20: note = Description of Artificial Sequence: Synthetic oligonucleotide
  misc_feature 1..20: note = Target: SCN10A; (+) strand; PAM type: YTN; PAM sequence: TTA
  source 1..20: mol_type = other DNA
aaaaagggctttatatattt

SEQ ID NO: 73619 - DNA, 20 bp, synthetic construct
  misc_feature 1..20: note = Description of Artificial Sequence: Synthetic oligonucleotide
  misc_feature 1..20: note = Target: SCN10A; (+) strand; PAM type: YTN; PAM sequence: CTT
  source 1..20: mol_type = other DNA
tatatatttgcatttcacaa

SEQ ID NO: 73620 - DNA, 20 bp, synthetic construct
  misc_feature 1..20: note = Description of Artificial Sequence: Synthetic oligonucleotide
  misc_feature 1..20: note = Target: SCN10A; (+) strand; PAM type: YTN; PAM sequence: TTT
  source 1..20: mol_type = other DNA
atatatttgcatttcacaaa

SEQ ID NO: 73621 - DNA, 20 bp, synthetic construct
  misc_feature 1..20: note = Description of Artificial Sequence: Synthetic oligonucleotide
  misc_feature 1..20: note = Target: SCN10A; (+) strand; PAM type: YTN; PAM sequence: TTA
  source 1..20: mol_type = other DNA
tatatttgcatttcacaaag

SEQ ID NO: 73622 - DNA, 20 bp, synthetic construct
  misc_feature 1..20: note = Description of Artificial Sequence: Synthetic oligonucleotide
  misc_feature 1..20: note = Target: SCN10A; (+) strand; PAM type: YTN; PAM sequence: TTT
  source 1..20: mol_type = other DNA
gcatttcacaaagcaagtga

SEQ ID NO: 73623 - DNA, 20 bp, synthetic construct
  misc_feature 1..20: note = Description of Artificial Sequence: Synthetic oligonucleotide
  misc_feature 1..20: note = Target: SCN10A; (+) strand; PAM type: YTN; PAM sequence: TTG
  source 1..20: mol_type = other DNA
catttcacaaagcaagtgag

SEQ ID NO: 73624 - DNA, 20 bp, synthetic construct
  misc_feature 1..20: note = Description of Artificial Sequence: Synthetic oligonucleotide
  misc_feature 1..20: note = Target: SCN10A; (+) strand; PAM type: YTN; PAM sequence: TTT
  source 1..20: mol_type = other DNA
cacaaagcaagtgaggtgtt

SEQ ID NO: 73625 - DNA, 20 bp, synthetic construct
  misc_feature 1..20: note = Description of Artificial Sequence: Synthetic oligonucleotide
  misc_feature 1..20: note = Target: SCN10A; (+) strand; PAM type: YTN; PAM sequence: TTC
  source 1..20: mol_type = other DNA
acaaagcaagtgaggtgttg

SEQ ID NO: 73626 - DNA, 20 bp, synthetic construct
  misc_feature 1..20: note = Description of Artificial Sequence: Synthetic oligonucleotide
  misc_feature 1..20: note = Target: SCN10A; (+) strand; PAM type: YTN; PAM sequence: TTG
  source 1..20: mol_type = other DNA
atccacctagaattgattct

SEQ ID NO: 73627 - DNA, 20 bp, synthetic construct
  misc_feature 1..20: note = Description of Artificial Sequence: Synthetic oligonucleotide
  misc_feature 1..20: note = Target: SCN10A; (+) strand; PAM type: YTN; PAM sequence: CTA
  source 1..20: mol_type = other DNA
gaattgattcttgtgtgtgg

SEQ ID NO: 73628 - DNA, 20 bp, synthetic construct
  misc_feature 1..20: note = Description of Artificial Sequence: Synthetic oligonucleotide
  misc_feature 1..20: note = Target: SCN10A; (+) strand; PAM type: YTN; PAM sequence: TTG
  source 1..20: mol_type = other DNA
attcttgtgtgtggtgcaaa

SEQ ID NO: 73629 - DNA, 20 bp, synthetic construct
  misc_feature 1..20: note = Description of Artificial Sequence: Synthetic oligonucleotide
  misc_feature 1..20: note = Target: SCN10A; (+) strand; PAM type: YTN; PAM sequence: TTC
  source 1..20: mol_type = other DNA
ttgtgtgtggtgcaaagttg

SEQ ID NO: 73630 - DNA, 20 bp, synthetic construct
  misc_feature 1..20: note = Description of Artificial Sequence: Synthetic oligonucleotide
  misc_feature 1..20: note = Target: SCN10A; (+) strand; PAM type: YTN; PAM sequence: CTT
  source 1..20: mol_type = other DNA
gtgtgtggtgcaaagttgga

SEQ ID NO: 73631 - DNA, 20 bp, synthetic construct
  misc_feature 1..20: note = Description of Artificial Sequence: Synthetic oligonucleotide
  misc_feature 1..20: note = Target: SCN10A; (+) strand; PAM type: YTN; PAM sequence: TTG
  source 1..20: mol_type = other DNA
tgtgtggtgcaaagttggat

SEQ ID NO: 73632 - DNA, 20 bp, synthetic construct
  misc_feature 1..20: note = Description of Artificial Sequence: Synthetic oligonucleotide
  misc_feature 1..20: note = Target: SCN10A; (+) strand; PAM type: YTN; PAM sequence: TTG
  source 1..20: mol_type = other DNA
gatgtttaatgtagtttttc

SEQ ID NO: 73633 - DNA, 20 bp, synthetic construct
  misc_feature 1..20: note = Description of Artificial Sequence: Synthetic oligonucleotide
  misc_feature 1..20: note = Target: SCN10A; (+) strand; PAM type: YTN; PAM sequence: TTT
  source 1..20: mol_type = other DNA
aatgtagtttttccagtgag

SEQ ID NO: 73634 - DNA, 20 bp, synthetic construct
  misc_feature 1..20: note = Description of Artificial Sequence: Synthetic oligonucleotide
  misc_feature 1..20: note = Target: SCN10A; (+) strand; PAM type: YTN; PAM sequence: TTA
  source 1..20: mol_type = other DNA
atgtagtttttccagtgaga

SEQ ID NO: 73635 - DNA, 20 bp, synthetic construct
  misc_feature 1..20: note = Description of Artificial Sequence: Synthetic oligonucleotide
  misc_feature 1..20: note = Target: SCN10A; (+) strand; PAM type: YTN; PAM sequence: TTT
  source 1..20: mol_type = other DNA
ttccagtgagattcctaatt

SEQ ID NO: 73636 - DNA, 20 bp, synthetic construct
  misc_feature 1..20: note = Description of Artificial Sequence: Synthetic oligonucleotide
  misc_feature 1..20: note = Target: SCN10A; (+) strand; PAM type: YTN; PAM sequence: TTT
  source 1..20: mol_type = other DNA
tccagtgagattcctaattc

SEQ ID NO: 73637 - DNA, 20 bp, synthetic construct
  misc_feature 1..20: note = Description of Artificial Sequence: Synthetic oligonucleotide
  misc_feature 1..20: note = Target: SCN10A; (+) strand; PAM type: YTN; PAM sequence: TTT
  source 1..20: mol_type = other DNA
ccagtgagattcctaattct

SEQ ID NO: 73638 - DNA, 20 bp, synthetic construct
  misc_feature 1..20: note = Description of Artificial Sequence: Synthetic oligonucleotide
  misc_feature 1..20: note = Target: SCN10A; (+) strand; PAM type: YTN; PAM sequence: TTC
  source 1..20: mol_type = other DNA
cagtgagattcctaattctt

SEQ ID NO: 73639 - DNA, 20 bp, synthetic construct
  misc_feature 1..20: note = Description of Artificial Sequence: Synthetic oligonucleotide
  misc_feature 1..20: note = Target: SCN10A; (+) strand; PAM type: YTN; PAM sequence: TTC
  source 1..20: mol_type = other DNA
ctaattcttcagcatcattt

SEQ ID NO: 73640 - DNA, 20 bp, synthetic construct
  misc_feature 1..20: note = Description of Artificial Sequence: Synthetic oligonucleotide
  misc_feature 1..20: note = Target: SCN10A; (+) strand; PAM type: YTN; PAM sequence: CTA
  source 1..20: mol_type = other DNA
attcttcagcatcatttttt

SEQ ID NO: 73641 - DNA, 20 bp, synthetic construct
  misc_feature 1..20: note = Description of Artificial Sequence: Synthetic oligonucleotide
  misc_feature 1..20: note = Target: SCN10A; (+) strand; PAM type: YTN; PAM sequence: TTC
  source 1..20: mol_type = other DNA
ttcagcatcattttttgaag

SEQ ID NO: 73642 - DNA, 20 bp, synthetic construct
  misc_feature 1..20: note = Description of Artificial Sequence: Synthetic oligonucleotide
  misc_feature 1..20: note = Target: SCN10A; (+) strand; PAM type: YTN; PAM sequence: CTT
  source 1..20: mol_type = other DNA
cagcatcattttttgaagac

SEQ ID NO: 73643 - DNA, 20 bp, synthetic construct
  misc_feature 1..20: note = Description of Artificial Sequence: Synthetic oligonucleotide
  misc_feature 1..20: note = Target: SCN10A; (+) strand; PAM type: YTN; PAM sequence: TTC
  source 1..20: mol_type = other DNA
agcatcattttttgaagacc

SEQ ID NO: 73644 - DNA, 20 bp, synthetic construct
  misc_feature 1..20: note = Description of Artificial Sequence: Synthetic oligonucleotide
  misc_feature 1..20: note = Target: SCN10A; (+) strand; PAM type: YTN; PAM sequence: TTT
  source 1..20: mol_type = other DNA
tttgaagaccgccttttccc

SEQ ID NO: 73645 - DNA, 20 bp, synthetic construct
  misc_feature 1..20: note = Description of Artificial Sequence: Synthetic oligonucleotide
  misc_feature 1..20: note = Target: SCN10A; (+) strand; PAM type: YTN; PAM sequence: TTT
  source 1..20: mol_type = other DNA
ttgaagaccgccttttccct

SEQ ID NO: 73646 - DNA, 20 bp, synthetic construct
  misc_feature 1..20: note = Description of Artificial Sequence: Synthetic oligonucleotide
  misc_feature 1..20: note = Target: SCN10A; (+) strand; PAM type: YTN; PAM sequence: TTT
  source 1..20: mol_type = other DNA
tgaagaccgccttttccctg

SEQ ID NO: 73647 - DNA, 20 bp, synthetic construct
  misc_feature 1..20: note = Description of Artificial Sequence: Synthetic oligonucleotide
  misc_feature 1..20: note = Target: SCN10A; (+) strand; PAM type: YTN; PAM sequence: TTT
  source 1..20: mol_type = other DNA
gaagaccgccttttccctgc

SEQ ID NO: 73648 - DNA, 20 bp, synthetic construct
  misc_feature 1..20: note = Description of Artificial Sequence: Synthetic oligonucleotide
  misc_feature 1..20: note = Target: SCN10A; (+) strand; PAM type: YTN; PAM sequence: TTG
  source 1..20: mol_type = other DNA
aagaccgccttttccctgct

SEQ ID NO: 73649 - DNA, 20 bp, synthetic construct
  misc_feature 1..20: note = Description of Artificial Sequence: Synthetic oligonucleotide
  misc_feature 1..20: note = Target: SCN10A; (+) strand; PAM type: YTN; PAM sequence: CTT
  source 1..20: mol_type = other DNA
ttccctgctgttctggggtg

SEQ ID NO: 73650 - DNA, 20 bp, synthetic construct
  misc_feature 1..20: note = Description of Artificial Sequence: Synthetic oligonucleotide
  misc_feature 1..20: note = Target: SCN10A; (+) strand; PAM type: YTN; PAM sequence: TTT
  source 1..20: mol_type = other DNA
tccctgctgttctggggtgc

SEQ ID NO: 73651 - DNA, 20 bp, synthetic construct
  misc_feature 1..20: note = Description of Artificial Sequence: Synthetic oligonucleotide
  misc_feature 1..20: note = Target: SCN10A; (+) strand; PAM type: YTN; PAM sequence: TTT
  source 1..20: mol_type = other DNA
ccctgctgttctggggtgcc

SEQ ID NO: 73652 - DNA, 20 bp, synthetic construct
  misc_feature 1..20: note = Description of Artificial Sequence: Synthetic oligonucleotide
  misc_feature 1..20: note = Target: SCN10A; (+) strand; PAM type: YTN; PAM sequence: TTC
  source 1..20: mol_type = other DNA
cctgctgttctggggtgcca

SEQ ID NO: 73653 - DNA, 20 bp, synthetic construct
  misc_feature 1..20: note = Description of Artificial Sequence: Synthetic oligonucleotide
  misc_feature 1..20: note = Target: SCN10A; (+) strand; PAM type: YTN; PAM sequence: CTG
  source 1..20: mol_type = other DNA
ctgttctggggtgccacctt

SEQ ID NO: 73654 - DNA, 20 bp, synthetic construct
  misc_feature 1..20: note = Description of Artificial Sequence: Synthetic oligonucleotide
  misc_feature 1..20: note = Target: SCN10A; (+) strand; PAM type: YTN; PAM sequence: CTG
  source 1..20: mol_type = other DNA
ttctggggtgccaccttttc

SEQ ID NO: 73655 - DNA, 20 bp, synthetic construct
  misc_feature 1..20: note = Description of Artificial Sequence: Synthetic oligonucleotide
  misc_feature 1..20: note = Target: SCN10A; (+) strand; PAM type: YTN; PAM sequence: TTC
  source 1..20: mol_type = other DNA
tggggtgccaccttttcaca

SEQ ID NO: 73656 - DNA, 20 bp, synthetic construct
  misc_feature 1..20: note = Description of Artificial Sequence: Synthetic oligonucleotide
  misc_feature 1..20: note = Target: SCN10A; (+) strand; PAM type: YTN; PAM sequence: CTG
  source 1..20: mol_type = other DNA
gggtgccaccttttcacaca

SEQ ID NO: 73657 - DNA, 20 bp, synthetic construct
  misc_feature 1..20: note = Description of Artificial Sequence: Synthetic oligonucleotide
  misc_feature 1..20: note = Target: SCN10A; (+) strand; PAM type: YTN; PAM sequence: CTT
  source 1..20: mol_type = other DNA
ttcacacattagatgtttac

SEQ ID NO: 73658 - DNA, 20 bp, synthetic construct
  misc_feature 1..20: note = Description of Artificial Sequence: Synthetic oligonucleotide
  misc_feature 1..20: note = Target: SCN10A; (+) strand; PAM type: YTN; PAM sequence: TTT
  source 1..20: mol_type = other DNA
tcacacattagatgtttaca

SEQ ID NO: 73659 - DNA, 20 bp, synthetic construct
  misc_feature 1..20: note = Description of Artificial Sequence: Synthetic oligonucleotide
  misc_feature 1..20: note = Target: SCN10A; (+) strand; PAM type: YTN; PAM sequence: TTT
  source 1..20: mol_type = other DNA
cacacattagatgtttacat

SEQ ID NO: 73660 - DNA, 20 bp, synthetic construct
  misc_feature 1..20: note = Description of Artificial Sequence: Synthetic oligonucleotide
  misc_feature 1..20: note = Target: SCN10A; (+) strand; PAM type: YTN; PAM sequence: TTC
  source 1..20: mol_type = other DNA
acacattagatgtttacata

SEQ ID NO: 73661 - DNA, 20 bp, synthetic construct
  misc_feature 1..20: note = Description of Artificial Sequence: Synthetic oligonucleotide
  misc_feature 1..20: note = Target: SCN10A; (+) strand; PAM type: YTN; PAM sequence: TTA
  source 1..20: mol_type = other DNA
gatgtttacatatgtgttgg

SEQ ID NO: 73662 - DNA, 20 bp, synthetic construct
  misc_feature 1..20: note = Description of Artificial Sequence: Synthetic oligonucleotide
  misc_feature 1..20: note = Target: SCN10A; (+) strand; PAM type: YTN; PAM sequence: TTT
  source 1..20: mol_type = other DNA
acatatgtgttggtctgttt

SEQ ID NO: 73663 - DNA, 20 bp, synthetic construct
  misc_feature 1..20: note = Description of Artificial Sequence: Synthetic oligonucleotide
  misc_feature 1..20: note = Target: SCN10A; (+) strand; PAM type: YTN; PAM sequence: TTA
  source 1..20: mol_type = other DNA
catatgtgttggtctgttta

SEQ ID NO: 73664 - DNA, 20 bp, synthetic construct
  misc_feature 1..20: note = Description of Artificial Sequence: Synthetic oligonucleotide
  misc_feature 1..20: note = Target: SCN10A; (+) strand; PAM type: YTN; PAM sequence: TTG
  source 1..20: mol_type = other DNA
gtctgtttatggactgtcta

SEQ ID NO: 73665 - DNA, 20 bp, synthetic construct
  misc_feature 1..20: note = Description of Artificial Sequence: Synthetic oligonucleotide
  misc_feature 1..20: note = Target: SCN10A; (+) strand; PAM type: YTN; PAM sequence: CTG
  source 1..20: mol_type = other DNA
tttatggactgtctatgctg

SEQ ID NO: 73666 - DNA, 20 bp, synthetic construct
  misc_feature 1..20: note = Description of Artificial Sequence: Synthetic oligonucleotide
  misc_feature 1..20: note = Target: SCN10A; (+) strand; PAM type: YTN; PAM sequence: TTT
  source 1..20: mol_type = other DNA
atggactgtctatgctgtta

SEQ ID NO: 73667 - DNA, 20 bp, synthetic construct
  misc_feature 1..20: note = Description of Artificial Sequence: Synthetic oligonucleotide
  misc_feature 1..20: note = Target: SCN10A; (+) strand; PAM type: YTN; PAM sequence: TTA
  source 1..20: mol_type = other DNA
tggactgtctatgctgttac

SEQ ID NO: 73668 - DNA, 20 bp, synthetic construct
  misc_feature 1..20: note = Description of Artificial Sequence: Synthetic oligonucleotide
  misc_feature 1..20: note = Target: SCN10A; (+) strand; PAM type: YTN; PAM sequence: CTG
  source 1..20: mol_type = other DNA
tctatgctgttacattattc

SEQ ID NO: 73669 - DNA, 20 bp, synthetic construct
  misc_feature 1..20: note = Description of Artificial Sequence: Synthetic oligonucleotide
  misc_feature 1..20: note = Target: SCN10A; (+) strand; PAM type: YTN; PAM sequence: CTA
  source 1..20: mol_type = other DNA
tgctgttacattattctgac

SEQ ID NO: 73670 - DNA, 20 bp, synthetic construct
  misc_feature 1..20: note = Description of Artificial Sequence: Synthetic oligonucleotide
  misc_feature 1..20: note = Target: SCN10A; (+) strand; PAM type: YTN; PAM sequence: CTG
  source 1..20: mol_type = other DNA
ttacattattctgaccaatc

SEQ ID NO: 73671 - DNA, 20 bp, synthetic construct
  misc_feature 1..20: note = Description of Artificial Sequence: Synthetic oligonucleotide
  misc_feature 1..20: note = Target: SCN10A; (+) strand; PAM type: YTN; PAM sequence: TTA
  source 1..20: mol_type = other DNA
cattattctgaccaatctta

SEQ ID NO: 73672 - DNA, 20 bp, synthetic construct
  misc_feature 1..20: note = Description of Artificial Sequence: Synthetic oligonucleotide
  misc_feature 1..20: note = Target: SCN10A; (+) strand; PAM type: YTN; PAM sequence: TTA
  source 1..20: mol_type = other DNA
ttctgaccaatcttacacca

SEQ ID NO: 73673 - DNA, 20 bp, synthetic construct
  misc_feature 1..20: note = Description of Artificial Sequence: Synthetic oligonucleotide
  misc_feature 1..20: note = Target: SCN10A; (+) strand; PAM type: YTN; PAM sequence: TTC
  source 1..20: mol_type = other DNA
tgaccaatcttacaccaatg

SEQ ID NO: 73674 - DNA, 20 bp, synthetic construct
  misc_feature 1..20: note = Description of Artificial Sequence: Synthetic oligonucleotide
  misc_feature 1..20: note = Target: SCN10A; (+) strand; PAM type: YTN; PAM sequence: CTG
  source 1..20: mol_type = other DNA
accaatcttacaccaatggc

SEQ ID NO: 73675 - DNA, 20 bp, synthetic construct
  misc_feature 1..20: note = Description of Artificial Sequence: Synthetic oligonucleotide
  misc_feature 1..20: note = Target: SCN10A; (+) strand; PAM type: YTN; PAM sequence: CTT
  source 1..20: mol_type = other DNA
acaccaatggcacactgctt

SEQ ID NO: 73676 - DNA, 20 bp, synthetic construct
  misc_feature 1..20: note = Description of Artificial Sequence: Synthetic oligonucleotide
  misc_feature 1..20: note = Target: SCN10A; (+) strand; PAM type: YTN; PAM sequence: TTA
  source 1..20: mol_type = other DNA
caccaatggcacactgcttc

SEQ ID NO: 73677 - DNA, 20 bp, synthetic construct
  misc_feature 1..20: note = Description of Artificial Sequence: Synthetic oligonucleotide
  misc_feature 1..20: note = Target: SCN10A; (+) strand; PAM type: YTN; PAM sequence: CTG
  source 1..20: mol_type = other DNA
cttcaattagagctttatag

SEQ ID NO: 73678 - DNA, 20 bp, synthetic construct
  misc_feature 1..20: note = Description of Artificial Sequence: Synthetic oligonucleotide
  misc_feature 1..20: note = Target: SCN10A; (+) strand; PAM type: YTN; PAM sequence: CTT
  source 1..20: mol_type = other DNA
caattagagctttatagtaa

SEQ ID NO: 73679 - DNA, 20 bp, synthetic construct
  misc_feature 1..20: note = Description of Artificial Sequence: Synthetic oligonucleotide
  misc_feature 1..20: note = Target: SCN10A; (+) strand; PAM type: YTN; PAM sequence: TTC
  source 1..20: mol_type = other DNA
aattagagctttatagtaaa

SEQ ID NO: 73680 - DNA, 20 bp, synthetic construct
  misc_feature 1..20: note = Description of Artificial Sequence: Synthetic oligonucleotide
  misc_feature 1..20: note = Target: SCN10A; (+) strand; PAM type: YTN; PAM sequence: TTA
  source 1..20: mol_type = other DNA
gagctttatagtaaatctcg

SEQ ID NO: 73681 - DNA, 20 bp, synthetic construct
  misc_feature 1..20: note = Description of Artificial Sequence: Synthetic oligonucleotide
  misc_feature 1..20: note = Target: SCN10A; (+) strand; PAM type: YTN; PAM sequence: CTT
  source 1..20: mol_type = other DNA
tatagtaaatctcgacatcc

SEQ ID NO: 73682 - DNA, 20 bp, synthetic construct
  misc_feature 1..20: note = Description of Artificial Sequence: Synthetic oligonucleotide
  misc_feature 1..20: note = Target: SCN10A; (+) strand; PAM type: YTN; PAM sequence: TTT
  source 1..20: mol_type = other DNA
atagtaaatctcgacatcca

SEQ ID NO: 73683 - DNA, 20 bp, synthetic construct
  misc_feature 1..20: note = Description of Artificial Sequence: Synthetic oligonucleotide
  misc_feature 1..20: note = Target: SCN10A; (+) strand; PAM type: YTN; PAM sequence: TTA
  source 1..20: mol_type = other DNA
tagtaaatctcgacatccag

SEQ ID NO: 73684 - DNA, 20 bp, synthetic construct
  misc_feature 1..20: note = Description of Artificial Sequence: Synthetic oligonucleotide
  misc_feature 1..20: note = Target: SCN10A; (+) strand; PAM type: YTN; PAM sequence: CTC
  source 1..20: mol_type = other DNA
gacatccagtagaatgagtt

SEQ ID NO: 73685 - DNA, 20 bp, synthetic construct
  misc_feature 1..20: note = Description of Artificial Sequence: Synthetic oligonucleotide
  misc_feature 1..20: note = Target: SCN10A; (+) strand; PAM type: YTN; PAM sequence: TTC
  source 1..20: mol_type = other DNA
tcccactttgtatttcttcc

SEQ ID NO: 73686 - DNA, 20 bp, synthetic construct
  misc_feature 1..20: note = Description of Artificial Sequence: Synthetic oligonucleotide
  misc_feature 1..20: note = Target: SCN10A; (+) strand; PAM type: YTN; PAM sequence: CTC
  source 1..20: mol_type = other DNA
ccactttgtatttcttcctc

SEQ ID NO: 73687 - DNA, 20 bp, synthetic construct
  misc_feature 1..20: note = Description of Artificial Sequence: Synthetic oligonucleotide
  misc_feature 1..20: note = Target: SCN10A; (+) strand; PAM type: YTN; PAM sequence: CTT
  source 1..20: mol_type = other DNA
tgtatttcttcctcaaaagt

SEQ ID NO: 73688 - DNA, 20 bp, synthetic construct
  misc_feature 1..20: note = Description of Artificial Sequence: Synthetic oligonucleotide
  misc_feature 1..20: note = Target: SCN10A; (+) strand; PAM type: YTN; PAM sequence: TTT
  source 1..20: mol_type = other DNA
gtatttcttcctcaaaagtt

SEQ ID NO: 73689 - DNA, 20 bp, synthetic construct
  misc_feature 1..20: note = Description of Artificial Sequence: Synthetic oligonucleotide
  misc_feature 1..20: note = Target: SCN10A; (+) strand; PAM type: YTN; PAM sequence: TTG
  source 1..20: mol_type = other DNA
tatttcttcctcaaaagttt

SEQ ID NO: 73690 - DNA, 20 bp, synthetic construct
  misc_feature 1..20: note = Description of Artificial Sequence: Synthetic oligonucleotide
  misc_feature 1..20: note = Target: SCN10A; (+) strand; PAM type: YTN; PAM sequence: TTT
  source 1..20: mol_type = other DNA
cttcctcaaaagtttcttgg

SEQ ID NO: 73691 - DNA, 20 bp, synthetic construct
  misc_feature 1..20: note = Description of Artificial Sequence: Synthetic oligonucleotide
  misc_feature 1..20: note = Target: SCN10A; (+) strand; PAM type: YTN; PAM sequence: TTC
  source 1..20: mol_type = other DNA
ttcctcaaaagtttcttggc

SEQ ID NO: 73692 - DNA, 20 bp, synthetic construct
  misc_feature 1..20: note = Description of Artificial Sequence: Synthetic oligonucleotide
  misc_feature 1..20: note = Target: SCN10A; (+) strand; PAM type: YTN; PAM sequence: CTT
  source 1..20: mol_type = other DNA
cctcaaaagtttcttggcta

SEQ ID NO: 73693 - DNA, 20 bp, synthetic construct
  misc_feature 1..20: note = Description of Artificial Sequence: Synthetic oligonucleotide
  misc_feature 1..20: note = Target: SCN10A; (+) strand; PAM type: YTN; PAM sequence: TTC
  source 1..20: mol_type = other DNA
ctcaaaagtttcttggctat

SEQ ID NO: 73694 - DNA, 20 bp, synthetic construct
  misc_feature 1..20: note = Description of Artificial Sequence: Synthetic oligonucleotide
  misc_feature 1..20: note = Target: SCN10A; (+) strand; PAM type: YTN; PAM sequence: CTC
  source 1..20: mol_type = other DNA
aaaagtttcttggctataat

SEQ ID NO: 73695 - DNA, 20 bp, synthetic construct
  misc_feature 1..20: note = Description of Artificial Sequence: Synthetic oligonucleotide
  misc_feature 1..20: note = Target: SCN10A; (+) strand; PAM type: YTN; PAM sequence: TTT
  source 1..20: mol_type = other DNA
cttggctataatttgctctt

SEQ ID NO: 73696 - DNA, 20 bp, synthetic construct
  misc_feature 1..20: note = Description of Artificial Sequence: Synthetic oligonucleotide
  misc_feature 1..20: note = Target: SCN10A; (+) strand; PAM type: YTN; PAM sequence: TTC
  source 1..20: mol_type = other DNA
ttggctataatttgctcttt

SEQ ID NO: 73697 - DNA, 20 bp, synthetic construct
  misc_feature 1..20: note = Description of Artificial Sequence: Synthetic oligonucleotide
  misc_feature 1..20: note = Target: SCN10A; (+) strand; PAM type: YTN; PAM sequence: CTT
  source 1..20: mol_type = other DNA
ggctataatttgctctttaa

SEQ ID NO: 73698 - DNA, 20 bp, synthetic construct
  misc_feature 1..20: note = Description of Artificial Sequence: Synthetic oligonucleotide
  misc_feature 1..20: note = Target: SCN10A; (+) strand; PAM type: YTN; PAM sequence: TTG
  source 1..20: mol_type = other DNA
gctataatttgctctttaaa

SEQ ID NO: 73699 - DNA, 20 bp, synthetic construct
  misc_feature 1..20: note = Description of Artificial Sequence: Synthetic oligonucleotide
  misc_feature 1..20: note = Target: SCN10A; (+) strand; PAM type: YTN; PAM sequence: CTA
  source 1..20: mol_type = other DNA
taatttgctctttaaaattt

SEQ ID NO: 73700 - DNA, 20 bp, synthetic construct
  misc_feature 1..20: note = Description of Artificial Sequence: Synthetic oligonucleotide
  misc_feature 1..20: note = Target: SCN10A; (+) strand; PAM type: YTN; PAM sequence: TTT
  source 1..20: mol_type = other DNA
gctctttaaaatttcatgta

SEQ ID NO: 73701 - DNA, 20 bp, synthetic construct
  misc_feature 1..20: note = Description of Artificial Sequence: Synthetic oligonucleotide
  misc_feature 1..20: note = Target: SCN10A; (+) strand; PAM type: YTN; PAM sequence: TTG
  source 1..20: mol_type = other DNA
ctctttaaaatttcatgtaa

SEQ ID NO: 73702 - DNA, 20 bp, synthetic construct
  misc_feature 1..20: note = Description of Artificial Sequence: Synthetic oligonucleotide
  misc_feature 1..20: note = Target: SCN10A; (+) strand; PAM type: YTN; PAM sequence: CTC
  source 1..20: mol_type = other DNA
tttaaaatttcatgtaaact

SEQ ID NO: 73703 - DNA, 20 bp, synthetic construct
  misc_feature 1..20: note = Description of Artificial Sequence: Synthetic oligonucleotide
  misc_feature 1..20: note = Target: SCN10A; (+) strand; PAM type: YTN; PAM sequence: CTT
  source 1..20: mol_type = other DNA
taaaatttcatgtaaacttt

SEQ ID NO: 73704 - DNA, 20 bp, synthetic construct
  misc_feature 1..20: note = Description of Artificial Sequence: Synthetic oligonucleotide
  misc_feature 1..20: note = Target: SCN10A; (+) strand; PAM type: YTN; PAM sequence: TTT
  source 1..20: mol_type = other DNA
aaaatttcatgtaaactttt

SEQ ID NO: 73705 - DNA, 20 bp, synthetic construct
  misc_feature 1..20: note = Description of Artificial Sequence: Synthetic oligonucleotide
  misc_feature 1..20: note = Target: SCN10A; (+) strand; PAM type: YTN; PAM sequence: TTA
  source 1..20: mol_type = other DNA
aaatttcatgtaaacttttg

SEQ ID NO: 73706 - DNA, 20 bp, synthetic construct
  misc_feature 1..20: note = Description of Artificial Sequence: Synthetic oligonucleotide
  misc_feature 1..20: note = Target: SCN10A; (+) strand; PAM type: YTN; PAM sequence: TTT
  source 1..20: mol_type = other DNA
catgtaaacttttgaggaag

SEQ ID NO: 73707 - DNA, 20 bp, synthetic construct
  misc_feature 1..20: note = Description of Artificial Sequence: Synthetic oligonucleotide
  misc_feature 1..20: note = Target: SCN10A; (+) strand; PAM type: YTN; PAM sequence: TTC
  source 1..20: mol_type = other DNA
atgtaaacttttgaggaaga

SEQ ID NO: 73708 - DNA, 20 bp, synthetic construct
  misc_feature 1..20: note = Description of Artificial Sequence: Synthetic oligonucleotide
  misc_feature 1..20: note = Target: SCN10A; (+) strand; PAM type: YTN; PAM sequence: CTT
  source 1..20: mol_type = other DNA
ttgaggaagaaaatttaaag

SEQ ID NO: 73709 - DNA, 20 bp, synthetic construct
  misc_feature 1..20: note = Description of Artificial Sequence: Synthetic oligonucleotide
  misc_feature 1..20: note = Target: SCN10A; (+) strand; PAM type: YTN; PAM sequence: TTT
  source 1..20: mol_type = other DNA
tgaggaagaaaatttaaagt

SEQ ID NO: 73710 - DNA, 20 bp, synthetic construct
  misc_feature 1..20: note = Description of Artificial Sequence: Synthetic oligonucleotide
  misc_feature 1..20: note = Target: SCN10A; (+) strand; PAM type: YTN; PAM sequence: TTT
  source 1..20: mol_type = other DNA
gaggaagaaaatttaaagtt

SEQ ID NO: 73711 - DNA, 20 bp, synthetic construct
  misc_feature 1..20: note = Description of Artificial Sequence: Synthetic oligonucleotide
  misc_feature 1..20: note = Target: SCN10A; (+) strand; PAM type: YTN; PAM sequence: TTG
  source 1..20: mol_type = other DNA
aggaagaaaatttaaagttt

SEQ ID NO: 73712 - DNA, 20 bp, synthetic construct
  misc_feature 1..20: note = Description of Artificial Sequence: Synthetic oligonucleotide
  misc_feature 1..20: note = Target: SCN10A; (+) strand; PAM type: YTN; PAM sequence: TTT
  source 1..20: mol_type = other DNA
aaagtttaaagtttgtcaag

SEQ ID NO: 73713 - DNA, 20 bp, synthetic construct
  misc_feature 1..20: note = Description of Artificial Sequence: Synthetic oligonucleotide
  misc_feature 1..20: note = Target: SCN10A; (+) strand; PAM type: YTN; PAM sequence: TTA
  source 1..20: mol_type = other DNA
aagtttaaagtttgtcaagt

SEQ ID NO: 73714 - DNA, 20 bp, synthetic construct
  misc_feature 1..20: note = Description of Artificial Sequence: Synthetic oligonucleotide
  misc_feature 1..20: note = Target: SCN10A; (+) strand; PAM type: YTN; PAM sequence: TTT
  source 1..20: mol_type = other DNA
aaagtttgtcaagtaatacc

SEQ ID NO: 73715 - DNA, 20 bp, synthetic construct
  misc_feature 1..20: note = Description of Artificial Sequence: Synthetic oligonucleotide
  misc_feature 1..20: note = Target: SCN10A; (+) strand; PAM type: YTN; PAM sequence: TTA
  source 1..20: mol_type = other DNA
aagtttgtcaagtaatacca

SEQ ID NO: 73716 - DNA, 20 bp, synthetic construct
  misc_feature 1..20: note = Description of Artificial Sequence: Synthetic oligonucleotide
  misc_feature 1..20: note = Target: SCN10A; (+) strand; PAM type: YTN; PAM sequence: TTT
  source 1..20: mol_type = other DNA
gtcaagtaataccaaaagaa

SEQ ID NO: 73717 - DNA, 20 bp, synthetic construct
  misc_feature 1..20: note = Description of Artificial Sequence: Synthetic oligonucleotide
  misc_feature 1..20: note = Target: SCN10A; (+) strand; PAM type: YTN; PAM sequence: TTG
  source 1..20: mol_type = other DNA
tcaagtaataccaaaagaag

SEQ ID NO: 73718 - DNA, 20 bp, synthetic construct
  misc_feature 1..20: note = Description of Artificial Sequence: Synthetic oligonucleotide
  misc_feature 1..20: note = Target: SCN10A; (+) strand; PAM type: YTN; PAM sequence: CTG
  source 1..20: mol_type = other DNA
ttgaaatattgatttgagga

SEQ ID NO: 73719 - DNA, 20 bp, synthetic construct
  misc_feature 1..20: note = Description of Artificial Sequence: Synthetic oligonucleotide
  misc_feature 1..20: note = Target: SCN10A; (+) strand; PAM type: YTN; PAM sequence: TTG
  source 1..20: mol_type = other DNA
aaatattgatttgaggatca

SEQ ID NO: 73720 - DNA, 20 bp, synthetic construct
  misc_feature 1..20: note = Description of Artificial Sequence: Synthetic oligonucleotide
  misc_feature 1..20: note = Target: SCN10A; (+) strand; PAM type: YTN; PAM sequence: TTG
  source 1..20: mol_type = other DNA
atttgaggatcatattaaat

SEQ ID NO: 73721 - DNA, 20 bp, synthetic construct
  misc_feature 1..20: note = Description of Artificial Sequence: Synthetic oligonucleotide
  misc_feature 1..20: note = Target: SCN10A; (+) strand; PAM type: YTN; PAM sequence: TTT
  source 1..20: mol_type = other DNA
gaggatcatattaaatttat

SEQ ID NO: 73722 - DNA, 20 bp, synthetic construct
  misc_feature 1..20: note = Description of Artificial Sequence: Synthetic oligonucleotide
  misc_feature 1..20: note = Target: SCN10A; (+) strand; PAM type: YTN; PAM sequence: TTG
  source 1..20: mol_type = other DNA
aggatcatattaaatttatt

SEQ ID NO: 73723 - DNA, 20 bp, synthetic construct
  misc_feature 1..20: note = Description of Artificial Sequence: Synthetic oligonucleotide
  misc_feature 1..20: note = Target: SCN10A; (+) strand; PAM type: YTN; PAM sequence: TTA
  source 1..20: mol_type = other DNA
aatttattaatcatttttgg

SEQ ID NO: 73724 - DNA, 20 bp, synthetic construct
  misc_feature 1..20: note = Description of Artificial Sequence: Synthetic oligonucleotide
  misc_feature 1..20: note = Target: SCN10A; (+) strand; PAM type: YTN; PAM sequence: TTT
  source 1..20: mol_type = other DNA
attaatcatttttgggagtc

SEQ ID NO: 73725 - DNA, 20 bp, synthetic construct
  misc_feature 1..20: note = Description of Artificial Sequence: Synthetic oligonucleotide
  misc_feature 1..20: note = Target: SCN10A; (+) strand; PAM type: YTN; PAM sequence: TTA
  source 1..20: mol_type = other DNA
ttaatcatttttgggagtct

SEQ ID NO: 73726 - DNA, 20 bp, synthetic construct
  misc_feature 1..20: note = Description of Artificial Sequence: Synthetic oligonucleotide
  misc_feature 1..20: note = Target: SCN10A; (+) strand; PAM type: YTN; PAM sequence: TTA
  source 1..20: mol_type = other DNA
atcatttttgggagtcttta

SEQ ID NO: 73727 - DNA, 20 bp, synthetic construct
  misc_feature 1..20: note = Description of Artificial Sequence: Synthetic oligonucleotide
  misc_feature 1..20: note = Target: SCN10A; (+) strand; PAM type: YTN; PAM sequence: TTT
  source 1..20: mol_type = other DNA
ttgggagtctttacaatatt

SEQ ID NO: 73728 - DNA, 20 bp, synthetic construct
  misc_feature 1..20: note = Description of Artificial Sequence: Synthetic oligonucleotide
  misc_feature 1..20: note = Target: SCN10A; (+) strand; PAM type: YTN; PAM sequence: TTT
  source 1..20: mol_type = other DNA
tgggagtctttacaatattg

SEQ ID NO: 73729 - DNA, 20 bp, synthetic construct
  misc_feature 1..20: note = Description of Artificial Sequence: Synthetic oligonucleotide
  misc_feature 1..20: note = Target: SCN10A; (+) strand; PAM type: YTN; PAM sequence: TTT
  source 1..20: mol_type = other DNA
gggagtctttacaatattga

SEQ ID NO: 73730 - DNA, 20 bp, synthetic construct
  misc_feature 1..20: note = Description of Artificial Sequence: Synthetic oligonucleotide
  misc_feature 1..20: note = Target: SCN10A; (+) strand; PAM type: YTN; PAM sequence: TTG
  source 1..20: mol_type = other DNA
ggagtctttacaatattgag

SEQ ID NO: 73731 - DNA, 20 bp, synthetic construct
  misc_feature 1..20: note = Description of Artificial Sequence: Synthetic oligonucleotide
  misc_feature 1..20: note = Target: SCN10A; (+) strand; PAM type: YTN; PAM sequence: CTT
  source 1..20: mol_type = other DNA
tacaatattgagactttgaa

SEQ ID NO: 73732 - DNA, 20 bp, synthetic construct
  misc_feature 1..20: note = Description of Artificial Sequence: Synthetic oligonucleotide
  misc_feature 1..20: note = Target: SCN10A; (+) strand; PAM type: YTN; PAM sequence: TTT
  source 1..20: mol_type = other DNA
acaatattgagactttgaat

SEQ ID NO: 73733 - DNA, 20 bp, synthetic construct
  misc_feature 1..20: note = Description of Artificial Sequence: Synthetic oligonucleotide
  misc_feature 1..20: note = Target: SCN10A; (+) strand; PAM type: YTN; PAM sequence: TTA
  source 1..20: mol_type = other DNA
caatattgagactttgaatc

SEQ ID NO: 73734 - DNA, 20 bp, synthetic construct
  misc_feature 1..20: note = Description of Artificial Sequence: Synthetic oligonucleotide
  misc_feature 1..20: note = Target: SCN10A; (+) strand; PAM type: YTN; PAM sequence: TTG
  source 1..20: mol_type = other DNA
agactttgaatctgagaaca

SEQ ID NO: 73735 - DNA, 20 bp, synthetic construct
  misc_feature 1..20: note = Description of Artificial Sequence: Synthetic oligonucleotide
  misc_feature 1..20: note = Target: SCN10A; (+) strand; PAM type: YTN; PAM sequence: CTT
  source 1..20: mol_type = other DNA
tgaatctgagaacatgtctc

SEQ ID NO: 73736 - DNA, 20 bp, synthetic construct
  misc_feature 1..20: note = Description of Artificial Sequence: Synthetic oligonucleotide
  misc_feature 1..20: note = Target: SCN10A; (+) strand; PAM type: YTN; PAM sequence: TTT
  source 1..20: mol_type = other DNA
gaatctgagaacatgtctcc

SEQ ID NO: 73737 - DNA, 20 bp, synthetic construct
  misc_feature 1..20: note = Description of Artificial Sequence: Synthetic oligonucleotide
  misc_feature 1..20: note = Target: SCN10A; (+) strand; PAM type: YTN; PAM sequence: TTG
  source 1..20: mol_type = other DNA
aatctgagaacatgtctccc

SEQ ID NO: 73738 - DNA, 20 bp, synthetic construct
  misc_feature 1..20: note = Description of Artificial Sequence: Synthetic oligonucleotide
  misc_feature 1..20: note = Target: SCN10A; (+) strand; PAM type: YTN; PAM sequence: CTG
  source 1..20: mol_type = other DNA
agaacatgtctccccactga

SEQ ID NO: 73739 - DNA, 20 bp, synthetic construct
  misc_feature 1..20: note = Description of Artificial Sequence: Synthetic oligonucleotide
  misc_feature 1..20: note = Target: SCN10A; (+) strand; PAM type: YTN; PAM sequence: CTC
  source 1..20: mol_type = other DNA
cccactgatttggttttctt

SEQ ID NO: 73740 - DNA, 20 bp, synthetic construct
  misc_feature 1..20: note = Description of Artificial Sequence: Synthetic oligonucleotide
  misc_feature 1..20: note = Target: SCN10A; (+) strand; PAM type: YTN; PAM sequence: CTG
  source 1..20: mol_type = other DNA
atttggttttctttaaaaac

SEQ ID NO: 73741 - DNA, 20 bp, synthetic construct
  misc_feature 1..20: note = Description of Artificial Sequence: Synthetic oligonucleotide
  misc_feature 1..20: note = Target: SCN10A; (+) strand; PAM type: YTN; PAM sequence: TTT
  source 1..20: mol_type = other DNA
ggttttctttaaaaacttta

SEQ ID NO: 73742 - DNA, 20 bp, synthetic construct
  misc_feature 1..20: note = Description of Artificial Sequence: Synthetic oligonucleotide
  misc_feature 1..20: note = Target: SCN10A; (+) strand; PAM type: YTN; PAM sequence: TTG
  source 1..20: mol_type = other DNA
gttttctttaaaaactttac

SEQ ID NO: 73743 - DNA, 20 bp, synthetic construct
  misc_feature 1..20: note = Description of Artificial Sequence: Synthetic oligonucleotide
  misc_feature 1..20: note = Target: SCN10A; (+) strand; PAM type: YTN; PAM sequence: TTT
  source 1..20: mol_type = other DNA
tctttaaaaactttacacaa

SEQ ID NO: 73744 - DNA, 20 bp, synthetic construct
  misc_feature 1..20: note = Description of Artificial Sequence: Synthetic oligonucleotide
  misc_feature 1..20: note = Target: SCN10A; (+) strand; PAM type: YTN; PAM sequence: TTT
  source 1..20: mol_type = other DNA
ctttaaaaactttacacaat

SEQ ID NO: 73745 - DNA, 20 bp, synthetic construct
  misc_feature 1..20: note = Description of Artificial Sequence: Synthetic oligonucleotide
  misc_feature 1..20: note = Target: SCN10A; (+) strand; PAM type: YTN; PAM sequence: TTC
  source 1..20: mol_type = other DNA
tttaaaaactttacacaata

SEQ ID NO: 73746 - DNA, 20 bp, synthetic construct
  misc_feature 1..20: note = Description of Artificial Sequence: Synthetic oligonucleotide
  misc_feature 1..20: note = Target: SCN10A; (+) strand; PAM type: YTN; PAM sequence: CTT
  source 1..20: mol_type = other DNA
taaaaactttacacaatact

SEQ ID NO: 73747 - DNA, 20 bp, synthetic construct
  misc_feature 1..20: note = Description of Artificial Sequence: Synthetic oligonucleotide
  misc_feature 1..20: note = Target: SCN10A; (+) strand; PAM type: YTN; PAM sequence: TTT
  source 1..20: mol_type = other DNA
aaaaactttacacaatactt

SEQ ID NO: 73748 - DNA, 20 bp, synthetic construct
  misc_feature 1..20: note = Description of Artificial Sequence: Synthetic oligonucleotide
  misc_feature 1..20: note = Target: SCN10A; (+) strand; PAM type: YTN; PAM sequence: TTA
  source 1..20: mol_type = other DNA
aaaactttacacaatactta

SEQ ID NO: 73749 - DNA, 20 bp, synthetic construct
  misc_feature 1..20: note = Description of Artificial Sequence: Synthetic oligonucleotide
  misc_feature 1..20: note = Target: SCN10A; (+) strand; PAM type: YTN; PAM sequence: CTT
  source 1..20: mol_type = other DNA
tacacaatacttattataat

SEQ ID NO: 73750 - DNA, 20 bp, synthetic construct
  misc_feature 1..20: note = Description of Artificial Sequence: Synthetic oligonucleotide
  misc_feature 1..20: note = Target: SCN10A; (+) strand; PAM type: YTN; PAM sequence: TTT
  source 1..20: mol_type = other DNA
acacaatacttattataatt

SEQ ID NO: 73751 - DNA, 20 bp, synthetic construct
  misc_feature 1..20: note = Description of Artificial Sequence: Synthetic oligonucleotide
  misc_feature 1..20: note = Target: SCN10A; (+) strand; PAM type: YTN; PAM sequence: TTA
  source 1..20: mol_type = other DNA
cacaatacttattataattt

SEQ ID NO: 73752 - DNA, 20 bp, synthetic construct
  misc_feature 1..20: note = Description of Artificial Sequence: Synthetic oligonucleotide
  misc_feature 1..20: note = Target: SCN10A; (+) strand; PAM type: YTN; PAM sequence: CTT
  source 1..20: mol_type = other DNA
attataattttccttataga

SEQ ID NO: 73753 - DNA, 20 bp, synthetic construct
  misc_feature 1..20: note = Description of Artificial Sequence: Synthetic oligonucleotide
  misc_feature 1..20: note = Target: SCN10A; (+) strand; PAM type: YTN; PAM sequence: TTA
  source 1..20: mol_type = other DNA
ttataattttccttatagag

SEQ ID NO: 73754 - DNA, 20 bp, synthetic construct
  misc_feature 1..20: note = Description of Artificial Sequence: Synthetic oligonucleotide
  misc_feature 1..20: note = Target: SCN10A; (+) strand; PAM type: YTN; PAM sequence: TTA
  source 1..20: mol_type = other DNA
taattttccttatagagatc

SEQ ID NO: 73755 - DNA, 20 bp, synthetic construct
  misc_feature 1..20: note = Description of Artificial Sequence: Synthetic oligonucleotide
  misc_feature 1..20: note = Target: SCN10A; (+) strand; PAM type: YTN; PAM sequence: TTT
  source 1..20: mol_type = other DNA
tccttatagagatctcactt

SEQ ID NO: 73756 - DNA, 20 bp, synthetic construct
  misc_feature 1..20: note = Description of Artificial Sequence: Synthetic oligonucleotide
  misc_feature 1..20: note = Target: SCN10A; (+) strand; PAM type: YTN; PAM sequence: TTT
  source 1..20: mol_type = other DNA
ccttatagagatctcactta

SEQ ID NO: 73757 - DNA, 20 bp, synthetic construct
  misc_feature 1..20: note = Description of Artificial Sequence: Synthetic oligonucleotide
  misc_feature 1..20: note = Target: SCN10A; (+) strand; PAM type: YTN; PAM sequence: TTC
  source 1..20: mol_type = other DNA
cttatagagatctcacttat

SEQ ID NO: 73758 - DNA, 20 bp, synthetic construct
  misc_feature 1..20: note = Description of Artificial Sequence: Synthetic oligonucleotide
  misc_feature 1..20: note = Target: SCN10A; (+) strand; PAM type: YTN; PAM sequence: CTT
  source 1..20: mol_type = other DNA
atagagatctcacttatact

SEQ ID NO: 73759 - DNA, 20 bp, synthetic construct
  misc_feature 1..20: note = Description of Artificial Sequence: Synthetic oligonucleotide
  misc_feature 1..20: note = Target: SCN10A; (+) strand; PAM type: YTN; PAM sequence: TTA
  source 1..20: mol_type = other DNA
tagagatctcacttatactt

SEQ ID NO: 73760 - DNA, 20 bp, synthetic construct
  misc_feature 1..20: note = Description of Artificial Sequence: Synthetic oligonucleotide
  misc_feature 1..20: note = Target: SCN10A; (+) strand; PAM type: YTN; PAM sequence: CTC
  source 1..20: mol_type = other DNA
acttatactttgataatctt

SEQ ID NO: 73761 - DNA, 20 bp, synthetic construct
  misc_feature 1..20: note = Description of Artificial Sequence: Synthetic oligonucleotide
  misc_feature 1..20: note = Target: SCN10A; (+) strand; PAM type: YTN; PAM sequence: CTT
  source 1..20: mol_type = other DNA
atactttgataatcttattc

SEQ ID NO: 73762 - DNA, 20 bp, synthetic construct
  misc_feature 1..20: note = Description of Artificial Sequence: Synthetic oligonucleotide
  misc_feature 1..20: note = Target: SCN10A; (+) strand; PAM type: YTN; PAM sequence: TTA
  source 1..20: mol_type = other DNA
tactttgataatcttattcc

SEQ ID NO: 73763 - DNA, 20 bp, synthetic construct
  misc_feature 1..20: note = Description of Artificial Sequence: Synthetic oligonucleotide
  misc_feature 1..20: note = Target: SCN10A; (+) strand; PAM type: YTN; PAM sequence: CTT
  source 1..20: mol_type = other DNA
tgataatcttattcctagat

SEQ ID NO: 73764 - DNA, 20 bp, synthetic construct
  misc_feature 1..20: note = Description of Artificial Sequence: Synthetic oligonucleotide
  misc_feature 1..20: note = Target: SCN10A; (+) strand; PAM type: YTN; PAM sequence: TTT
  source 1..20: mol_type = other DNA
gataatcttattcctagata

SEQ ID NO: 73765 - DNA, 20 bp, synthetic construct
  misc_feature 1..20: note = Description of Artificial Sequence: Synthetic oligonucleotide
  misc_feature 1..20: note = Target: SCN10A; (+) strand; PAM type: YTN; PAM sequence: TTG
  source 1..20: mol_type = other DNA
ataatcttattcctagatac

SEQ ID NO: 73766 - DNA, 20 bp, synthetic construct
  misc_feature 1..20: note = Description of Artificial Sequence: Synthetic oligonucleotide
  misc_feature 1..20: note = Target: SCN10A; (+) strand; PAM type: YTN; PAM sequence: CTT
  source 1..20: mol_type = other DNA
attcctagatacttgacatt

SEQ ID NO: 73767 - DNA, 20 bp, synthetic construct
  misc_feature 1..20: note = Description of Artificial Sequence: Synthetic oligonucleotide
  misc_feature 1..20: note = Target: SCN10A; (+) strand; PAM type: YTN; PAM sequence: TTA
  source 1..20: mol_type = other DNA
ttcctagatacttgacattt

SEQ ID NO: 73768 - DNA, 20 bp, synthetic construct
  misc_feature 1..20: note = Description of Artificial Sequence: Synthetic oligonucleotide
  misc_feature 1..20: note = Target: SCN10A; (+) strand; PAM type: YTN; PAM sequence: TTC
  source 1..20: mol_type = other DNA
ctagatacttgacattttaa

SEQ ID NO: 73769 - DNA, 20 bp, synthetic construct
  misc_feature 1..20: note = Description of Artificial Sequence: Synthetic oligonucleotide
  misc_feature 1..20: note = Target: SCN10A; (+) strand; PAM type: YTN; PAM sequence: CTA
  source 1..20: mol_type = other DNA
gatacttgacattttaaaat

SEQ ID NO: 73770 - DNA, 20 bp, synthetic construct
  misc_feature 1..20: note = Description of Artificial Sequence: Synthetic oligonucleotide
  misc_feature 1..20: note = Target: SCN10A; (+) strand; PAM type: YTN; PAM sequence: CTT
  source 1..20: mol_type = other DNA
gacattttaaaatgccagtg

SEQ ID NO: 73771 - DNA, 20 bp, synthetic construct
  misc_feature 1..20: note = Description of Artificial Sequence: Synthetic oligonucleotide
  misc_feature 1..20: note = Target: SCN10A; (+) strand; PAM type: YTN; PAM sequence: TTG
  source 1..20: mol_type = other DNA
acattttaaaatgccagtgt

SEQ ID NO: 73772 - DNA, 20 bp, synthetic construct
  misc_feature 1..20: note = Description of Artificial Sequence: Synthetic oligonucleotide
  misc_feature 1..20: note = Target: SCN10A; (+) strand; PAM type: YTN; PAM sequence: TTT
  source 1..20: mol_type = other DNA
taaaatgccagtgtaaatgg

SEQ ID NO: 73773 - DNA, 20 bp, synthetic construct
  misc_feature 1..20: note = Description of Artificial Sequence: Synthetic oligonucleotide
  misc_feature 1..20: note = Target: SCN10A; (+) strand; PAM type: YTN; PAM sequence: TTT
  source 1..20: mol_type = other DNA
aaaatgccagtgtaaatggt

SEQ ID NO: 73774 - DNA, 20 bp, synthetic construct
  misc_feature 1..20: note = Description of Artificial Sequence: Synthetic oligonucleotide
  misc_feature 1..20: note = Target: SCN10A; (+) strand; PAM type: YTN; PAM sequence: TTA
  source 1..20: mol_type = other DNA
aaatgccagtgtaaatggta

SEQ ID NO: 73775 - DNA, 20 bp, synthetic construct
  misc_feature 1..20: note = Description of Artificial Sequence: Synthetic oligonucleotide
  misc_feature 1..20: note = Target: SCN10A; (+) strand; PAM type: YTN; PAM sequence: TTT
  source 1..20: mol_type = other DNA
ttaaaaactattttctgttt

SEQ ID NO: 73776 - DNA, 20 bp, synthetic construct
  misc_feature 1..20: note = Description of Artificial Sequence: Synthetic oligonucleotide
  misc_feature 1..20: note = Target: SCN10A; (+) strand; PAM type: YTN; PAM sequence: TTT
  source 1..20: mol_type = other DNA
taaaaactattttctgtttg

SEQ ID NO: 73777 - DNA, 20 bp, synthetic construct
  misc_feature 1..20: note = Description of Artificial Sequence: Synthetic oligonucleotide
  misc_feature 1..20: note = Target: SCN10A; (+) strand; PAM type: YTN; PAM sequence: TTT
  source 1..20: mol_type = other DNA
aaaaactattttctgtttgt

SEQ ID NO: 73778 - DNA, 20 bp, synthetic construct
  misc_feature 1..20: note = Description of Artificial Sequence: Synthetic oligonucleotide
  misc_feature 1..20: note = Target: SCN10A; (+) strand; PAM type: YTN; PAM sequence: TTA
  source 1..20: mol_type = other DNA
aaaactattttctgtttgtt

SEQ ID NO: 73779 - DNA, 20 bp, synthetic construct
  misc_feature 1..20: note = Description of Artificial Sequence: Synthetic oligonucleotide
  misc_feature 1..20: note = Target: SCN10A; (+) strand; PAM type: YTN; PAM sequence: CTA
  source 1..20: mol_type = other DNA
ttttctgtttgttgctagtg

SEQ ID NO: 73780 - DNA, 20 bp, synthetic construct
  misc_feature 1..20: note = Description of Artificial Sequence: Synthetic oligonucleotide
  misc_feature 1..20: note = Target: SCN10A; (+) strand; PAM type: YTN; PAM sequence: TTT
  source 1..20: mol_type = other DNA
tctgtttgttgctagtgtct

SEQ ID NO: 73781 - DNA, 20 bp, synthetic construct
  misc_feature 1..20: note = Description of Artificial Sequence: Synthetic oligonucleotide
  misc_feature 1..20: note = Target: SCN10A; (+) strand; PAM type: YTN; PAM sequence: TTT
  source 1..20: mol_type = other DNA
ctgtttgttgctagtgtcta

SEQ ID NO: 73782 - DNA, 20 bp, synthetic construct
  misc_feature 1..20: note = Description of Artificial Sequence: Synthetic oligonucleotide
  misc_feature 1..20: note = Target: SCN10A; (+) strand; PAM type: YTN; PAM sequence: TTC
  source 1..20: mol_type = other DNA
tgtttgttgctagtgtctat

SEQ ID NO: 73783 - DNA, 20 bp, synthetic construct
  misc_feature 1..20: note = Description of Artificial Sequence: Synthetic oligonucleotide
  misc_feature 1..20: note = Target: SCN10A; (+) strand; PAM type: YTN; PAM sequence: CTG
  source 1..20: mol_type = other DNA
tttgttgctagtgtctatac

SEQ ID NO: 73784 - DNA, 20 bp, synthetic construct
  misc_feature 1..20: note = Description of Artificial Sequence: Synthetic oligonucleotide
  misc_feature 1..20: note = Target: SCN10A; (+) strand; PAM type: YTN; PAM sequence: TTT
  source 1..20: mol_type = other DNA
gttgctagtgtctatacaca

SEQ ID NO: 73785 - DNA, 20 bp, synthetic construct
  misc_feature 1..20: note = Description of Artificial Sequence: Synthetic oligonucleotide
  misc_feature 1..20: note = Target: SCN10A; (+) strand; PAM type: YTN; PAM sequence: TTG
  source 1..20: mol_type = other DNA
ttgctagtgtctatacacaa

SEQ ID NO: 73786 - DNA, 20 bp, synthetic construct
  misc_feature 1..20: note = Description of Artificial Sequence: Synthetic oligonucleotide
  misc_feature 1..20: note = Target: SCN10A; (+) strand; PAM type: YTN; PAM sequence: TTG
  source 1..20: mol_type = other DNA
ctagtgtctatacacaattg

SEQ ID NO: 73787 - DNA, 20 bp, synthetic construct
  misc_feature 1..20: note = Description of Artificial Sequence: Synthetic oligonucleotide
  misc_feature 1..20: note = Target: SCN10A; (+) strand; PAM type: YTN; PAM sequence: CTA
  source 1..20: mol_type = other DNA
gtgtctatacacaattgatt

SEQ ID NO: 73788 - DNA, 20 bp, synthetic construct
  misc_feature 1..20: note = Description of Artificial Sequence: Synthetic oligonucleotide
  misc_feature 1..20: note = Target: SCN10A; (+) strand; PAM type: YTN; PAM sequence: CTA
  source 1..20: mol_type = other DNA
tacacaattgatttatgtat

SEQ ID NO: 73789 - DNA, 20 bp, synthetic construct
  misc_feature 1..20: note = Description of Artificial Sequence: Synthetic oligonucleotide
  misc_feature 1..20: note = Target: SCN10A; (+) strand; PAM type: YTN; PAM sequence: TTG
  source 1..20: mol_type = other DNA
atttatgtatgttaatttgt

SEQ ID NO: 73790 - DNA, 20 bp, synthetic construct
  misc_feature 1..20: note = Description of Artificial Sequence: Synthetic oligonucleotide
  misc_feature 1..20: note = Target: SCN10A; (+) strand; PAM type: YTN; PAM sequence: TTT
  source 1..20: mol_type = other DNA
atgtatgttaatttgtaccc

SEQ ID NO: 73791 - DNA, 20 bp, synthetic construct
  misc_feature 1..20: note = Description of Artificial Sequence: Synthetic oligonucleotide
  misc_feature 1..20: note = Target: SCN10A; (+) strand; PAM type: YTN; PAM sequence: TTA
  source 1..20: mol_type = other DNA
tgtatgttaatttgtaccca

SEQ ID NO: 73792 - DNA, 20 bp, synthetic construct
  misc_feature 1..20: note = Description of Artificial Sequence: Synthetic oligonucleotide
  misc_feature 1..20: note = Target: SCN10A; (+) strand; PAM type: YTN; PAM sequence: TTA
  source 1..20: mol_type = other DNA
atttgtacccagctacctta

SEQ ID NO: 73793 - DNA, 20 bp, synthetic construct
  misc_feature 1..20: note = Description of Artificial Sequence: Synthetic oligonucleotide
  misc_feature 1..20: note = Target: SCN10A; (+) strand; PAM type: YTN; PAM sequence: TTT
  source 1..20: mol_type = other DNA
gtacccagctaccttactat

SEQ ID NO: 73794 - DNA, 20 bp, synthetic construct
  misc_feature 1..20: note = Description of Artificial Sequence: Synthetic oligonucleotide
  misc_feature 1..20: note = Target: SCN10A; (+) strand; PAM type: YTN; PAM sequence: TTG
  source 1..20: mol_type = other DNA
tacccagctaccttactata

SEQ ID NO: 73795 - DNA, 20 bp, synthetic construct
  misc_feature 1..20: note = Description of Artificial Sequence: Synthetic oligonucleotide
  misc_feature 1..20: note = Target: SCN10A; (+) strand; PAM type: YTN; PAM sequence: CTA
  source 1..20: mol_type = other DNA
ccttactatactcttttatt

SEQ ID NO: 73796 - DNA, 20 bp, synthetic construct
  misc_feature 1..20: note = Description of Artificial Sequence: Synthetic oligonucleotide
  misc_feature 1..20: note = Target: SCN10A; (+) strand; PAM type: YTN; PAM sequence: CTT
  source 1..20: mol_type = other DNA
actatactcttttattaatt

SEQ ID NO: 73797 - DNA, 20 bp, synthetic construct
  misc_feature 1..20: note = Description of Artificial Sequence: Synthetic oligonucleotide
  misc_feature 1..20: note = Target: SCN10A; (+) strand; PAM type: YTN; PAM sequence: TTA
  source 1..20: mol_type = other DNA
ctatactcttttattaattc

SEQ ID NO: 73798 - DNA, 20 bp, synthetic construct
  misc_feature 1..20: note = Description of Artificial Sequence: Synthetic oligonucleotide
  misc_feature 1..20: note = Target: SCN10A; (+) strand; PAM type: YTN; PAM sequence: CTA
  source 1..20: mol_type = other DNA
tactcttttattaattctta

SEQ ID NO: 73799 - DNA, 20 bp, synthetic construct
  misc_feature 1..20: note = Description of Artificial Sequence: Synthetic oligonucleotide
  misc_feature 1..20: note = Target: SCN10A; (+) strand; PAM type: YTN; PAM sequence: CTC
  source 1..20: mol_type = other DNA
ttttattaattcttactgtt

SEQ ID NO: 73800 - DNA, 20 bp, synthetic construct
  misc_feature 1..20: note = Description of Artificial Sequence: Synthetic oligonucleotide
  misc_feature 1..20: note = Target: SCN10A; (+) strand; PAM type: YTN; PAM sequence: CTT
  source 1..20: mol_type = other DNA
ttattaattcttactgttta

SEQ ID NO: 73801 - DNA, 20 bp, synthetic construct
  misc_feature 1..20: note = Description of Artificial Sequence: Synthetic oligonucleotide
  misc_feature 1..20: note = Target: SCN10A; (+) strand; PAM type: YTN; PAM sequence: TTT
  source 1..20: mol_type = other DNA
tattaattcttactgtttat

SEQ ID NO: 73802 - DNA, 20 bp, synthetic construct
  misc_feature 1..20: note = Description of Artificial Sequence: Synthetic oligonucleotide
  misc_feature 1..20: note = Target: SCN10A; (+) strand; PAM type: YTN; PAM sequence: TTT
  source 1..20: mol_type = other DNA
attaattcttactgtttatc

SEQ ID NO: 73803 - DNA, 20 bp, synthetic construct
  misc_feature 1..20: note = Description of Artificial Sequence: Synthetic oligonucleotide
  misc_feature 1..20: note = Target: SCN10A; (+) strand; PAM type: YTN; PAM sequence: TTA
  source 1..20: mol_type = other DNA
ttaattcttactgtttatct

SEQ ID NO: 73804 - DNA, 20 bp, synthetic construct
  misc_feature 1..20: note = Description of Artificial Sequence: Synthetic oligonucleotide
  misc_feature 1..20: note = Target: SCN10A; (+) strand; PAM type: YTN; PAM sequence: TTA
  source 1..20: mol_type = other DNA
attcttactgtttatctcta

SEQ ID NO: 73805 - DNA, 20 bp, synthetic construct
  misc_feature 1..20: note = Description of Artificial Sequence: Synthetic oligonucleotide
  misc_feature 1..20: note = Target: SCN10A; (+) strand; PAM type: YTN; PAM sequence: TTC
  source 1..20: mol_type = other DNA
ttactgtttatctctaggtt

SEQ ID NO: 73806 - DNA, 20 bp, synthetic construct
  misc_feature 1..20: note = Description of Artificial Sequence: Synthetic oligonucleotide
  misc_feature 1..20: note = Target: SCN10A; (+) strand; PAM type: YTN; PAM sequence: CTT
  source 1..20: mol_type = other DNA
actgtttatctctaggttat

SEQ ID NO: 73807 - DNA, 20 bp, synthetic construct
  misc_feature 1..20: note = Description of Artificial Sequence: Synthetic oligonucleotide
  misc_feature 1..20: note = Target: SCN10A; (+) strand; PAM type: YTN; PAM sequence: TTA
  source 1..20: mol_type = other DNA
ctgtttatctctaggttatg

SEQ ID NO: 73808 - DNA, 20 bp, synthetic construct
  misc_feature 1..20: note = Description of Artificial Sequence: Synthetic oligonucleotide
  misc_feature 1..20: note = Target: SCN10A; (+) strand; PAM type: YTN; PAM sequence: CTG
  source 1..20: mol_type = other DNA
tttatctctaggttatgttg

SEQ ID NO: 73809 - DNA, 20 bp, synthetic construct
  misc_feature 1..20: note = Description of Artificial Sequence: Synthetic oligonucleotide
  misc_feature 1..20: note = Target: SCN10A; (+) strand; PAM type: YTN; PAM sequence: TTT
  source 1..20: mol_type = other DNA
atctctaggttatgttggat

SEQ ID NO: 73810 - DNA, 20 bp, synthetic construct
  misc_feature 1..20: note = Description of Artificial Sequence: Synthetic oligonucleotide
  misc_feature 1..20: note = Target: SCN10A; (+) strand; PAM type: YTN; PAM sequence: TTA
  source 1..20: mol_type = other DNA
tctctaggttatgttggata

SEQ ID NO: 73811 - DNA, 20 bp, synthetic construct
  misc_feature 1..20: note = Description of Artificial Sequence: Synthetic oligonucleotide
  misc_feature 1..20: note = Target: SCN10A; (+) strand; PAM type: YTN; PAM sequence: CTC
  source 1..20: mol_type = other DNA
taggttatgttggatatttt

SEQ ID NO: 73812 - DNA, 20 bp, synthetic construct
  misc_feature 1..20: note = Description of Artificial Sequence: Synthetic oligonucleotide
  misc_feature 1..20: note = Target: SCN10A; (+) strand; PAM type: YTN; PAM sequence: CTA
  source 1..20: mol_type = other DNA
ggttatgttggatattttat

SEQ ID NO: 73813 - DNA, 20 bp, synthetic construct
  misc_feature 1..20: note = Description of Artificial Sequence: Synthetic oligonucleotide
  misc_feature 1..20: note = Target: SCN10A; (+) strand; PAM type: YTN; PAM sequence: TTA
  source 1..20: mol_type = other DNA
tgttggatattttatgtata

SEQ ID NO: 73814 - DNA, 20 bp, synthetic construct
  misc_feature 1..20: note = Description of Artificial Sequence: Synthetic oligonucleotide
  misc_feature 1..20: note = Target: SCN10A; (+) strand; PAM type: YTN; PAM sequence: TTG
  source 1..20: mol_type = other DNA
gatattttatgtatacaatc

SEQ ID NO: 73815 - DNA, 20 bp, synthetic construct
  misc_feature 1..20: note = Description of Artificial Sequence: Synthetic oligonucleotide
  misc_feature 1..20: note = Target: SCN10A; (+) strand; PAM type: YTN; PAM sequence: TTT
  source 1..20: mol_type = other DNA
tatgtatacaatcttattat

SEQ ID NO: 73816 - DNA, 20 bp, synthetic construct
  misc_feature 1..20: note = Description of Artificial Sequence: Synthetic oligonucleotide
  misc_feature 1..20: note = Target: SCN10A; (+) strand; PAM type: YTN; PAM sequence: TTT
  source 1..20: mol_type = other DNA
atgtatacaatcttattatc

SEQ ID NO: 73817 - DNA, 20 bp, synthetic construct
  misc_feature 1..20: note = Description of Artificial Sequence: Synthetic oligonucleotide
  misc_feature 1..20: note = Target: SCN10A; (+) strand; PAM type: YTN; PAM sequence: TTA
  source 1..20: mol_type = other DNA
tgtatacaatcttattatct

SEQ ID NO: 73818 - DNA, 20 bp, synthetic construct
  misc_feature 1..20: note = Description of Artificial Sequence: Synthetic oligonucleotide
  misc_feature 1..20: note = Target: SCN10A; (+) strand; PAM type: YTN; PAM sequence: CTT
  source 1..20: mol_type = other DNA
attatctgtaaattacatct

SEQ ID NO: 73819 - DNA, 20 bp, synthetic construct
  misc_feature 1..20: note = Description of Artificial Sequence: Synthetic oligonucleotide
  misc_feature 1..20: note = Target: SCN10A; (+) strand; PAM type: YTN; PAM sequence: TTA
  source 1..20: mol_type = other DNA
ttatctgtaaattacatctt

SEQ ID NO: 73820 - DNA, 20 bp, synthetic construct
  misc_feature 1..20: note = Description of Artificial Sequence: Synthetic oligonucleotide
  misc_feature 1..20: note = Target: SCN10A; (+) strand; PAM type: YTN; PAM sequence: TTA
  source 1..20: mol_type = other DNA
tctgtaaattacatcttcgg

SEQ ID NO: 73821 - DNA, 20 bp, synthetic construct
  misc_feature 1..20: note = Description of Artificial Sequence: Synthetic oligonucleotide
  misc_feature 1..20: note = Target: SCN10A; (+) strand; PAM type: YTN; PAM sequence: CTG
  source 1..20: mol_type = other DNA
taaattacatcttcggtact

SEQ ID NO: 73822 - DNA, 20 bp, synthetic construct
  misc_feature 1..20: note = Description of Artificial Sequence: Synthetic oligonucleotide
  misc_feature 1..20: note = Target: SCN10A; (+) strand; PAM type: YTN; PAM sequence: TTA
  source 1..20: mol_type = other DNA
catcttcggtacttttttct

SEQ ID NO: 73823 - DNA, 20 bp, synthetic construct
  misc_feature 1..20: note = Description of Artificial Sequence: Synthetic oligonucleotide
  misc_feature 1..20: note = Target: SCN10A; (+) strand; PAM type: YTN; PAM sequence: CTT
  source 1..20: mol_type = other DNA
cggtacttttttcttcttgc

SEQ ID NO: 73824 - DNA, 20 bp, synthetic construct
  misc_feature 1..20: note = Description of Artificial Sequence: Synthetic oligonucleotide
  misc_feature 1..20: note = Target: SCN10A; (+) strand; PAM type: YTN; PAM sequence: TTC
  source 1..20: mol_type = other DNA
ggtacttttttcttcttgca

SEQ ID NO: 73825 - DNA, 20 bp, synthetic construct
  misc_feature 1..20: note = Description of Artificial Sequence: Synthetic oligonucleotide
  misc_feature 1..20: note = Target: SCN10A; (+) strand; PAM type: YTN; PAM sequence: CTT
  source 1..20: mol_type = other DNA
ttttcttcttgcactttttt

SEQ ID NO: 73826 - DNA, 20 bp, synthetic construct
  misc_feature 1..20: note = Description of Artificial Sequence: Synthetic oligonucleotide
  misc_feature 1..20: note = Target: SCN10A; (+) strand; PAM type: YTN; PAM sequence: TTT
  source 1..20: mol_type = other DNA
tttcttcttgcacttttttt

SEQ ID NO: 73827 - DNA, 20 bp, synthetic construct
  misc_feature 1..20: note = Description of Artificial Sequence: Synthetic oligonucleotide
  misc_feature 1..20: note = Target: SCN10A; (+) strand; PAM type: YTN; PAM sequence: TTT
  source 1..20: mol_type = other DNA
ttcttcttgcactttttttt

SEQ ID NO: 73828 - DNA, 20 bp, synthetic construct
  misc_feature 1..20: note = Description of Artificial Sequence: Synthetic oligonucleotide
  misc_feature 1..20: note = Target: SCN10A; (+) strand; PAM type: YTN; PAM sequence: TTT
  source 1..20: mol_type = other DNA
tcttcttgcacttttttttt

SEQ ID NO: 73829 - DNA, 20 bp, synthetic construct
  misc_feature 1..20: note = Description of Artificial Sequence: Synthetic oligonucleotide
  misc_feature 1..20: note = Target: SCN10A; (+) strand; PAM type: YTN; PAM sequence: TTT
  source 1..20: mol_type = other DNA
cttcttgcactttttttttc

SEQ ID NO: 73830 - DNA, 20 bp, synthetic construct
  misc_feature 1..20: note = Description of Artificial Sequence: Synthetic oligonucleotide
  misc_feature 1..20: note = Target: SCN10A; (+) strand; PAM type: YTN; PAM sequence: TTC
  source 1..20: mol_type = other DNA
ttcttgcactttttttttct

SEQ ID NO: 73831 - DNA, 20 bp, synthetic construct
  misc_feature 1..20: note = Description of Artificial Sequence: Synthetic oligonucleotide
  misc_feature 1..20: note = Target: SCN10A; (+) strand; PAM type: YTN; PAM sequence: CTT
  source 1..20: mol_type = other DNA
cttgcactttttttttcttt

SEQ ID NO: 73832 - DNA, 20 bp, synthetic construct
  misc_feature 1..20: note = Description of Artificial Sequence: Synthetic oligonucleotide
  misc_feature 1..20: note = Target: SCN10A; (+) strand; PAM type: YTN; PAM sequence: TTC
  source 1..20: mol_type = other DNA
ttgcactttttttttctttg

SEQ ID NO: 73833 - DNA, 20 bp, synthetic construct
  misc_feature 1..20: note = Description of Artificial Sequence: Synthetic oligonucleotide
  misc_feature 1..20: note = Target: SCN10A; (+) strand; PAM type: YTN; PAM sequence: CTT
  source 1..20: mol_type = other DNA
gcactttttttttctttgct

SEQ ID NO: 73834 - DNA, 20 bp, synthetic construct
  misc_feature 1..20: note = Description of Artificial Sequence: Synthetic oligonucleotide
  misc_feature 1..20: note = Target: SCN10A; (+) strand; PAM type: YTN; PAM sequence: TTG
  source 1..20: mol_type = other DNA
cactttttttttctttgctt

SEQ ID NO: 73835 - DNA, 20 bp, synthetic construct
  misc_feature 1..20: note = Description of Artificial Sequence: Synthetic oligonucleotide
  misc_feature 1..20: note = Target: SCN10A; (+) strand; PAM type: YTN; PAM sequence: CTT
  source 1..20: mol_type = other DNA
tttttttctttgctttacta

SEQ ID NO: 73836 - DNA, 20 bp, synthetic construct
  misc_feature 1..20: note = Description of Artificial Sequence: Synthetic oligonucleotide
  misc_feature 1..20: note = Target: SCN10A; (+) strand; PAM type: YTN; PAM sequence: TTT
  source 1..20: mol_type = other DNA
ttttttctttgctttactat

SEQ ID NO: 73837 - DNA, 20 bp, synthetic construct
  misc_feature 1..20: note = Description of Artificial Sequence: Synthetic oligonucleotide
  misc_feature 1..20: note = Target: SCN10A; (+) strand; PAM type: YTN; PAM sequence: TTT
  source 1..20: mol_type = other DNA
tttttctttgctttactatg

SEQ ID NO: 73838 - DNA, 20 bp, synthetic construct
  misc_feature 1..20: note = Description of Artificial Sequence: Synthetic oligonucleotide
  misc_feature 1..20: note = Target: SCN10A; (+) strand; PAM type: YTN; PAM sequence: TTT
  source 1..20: mol_type = other DNA
ttttctttgctttactatgc

SEQ ID NO: 73839 - DNA, 20 bp, synthetic construct
  misc_feature 1..20: note = Description of Artificial Sequence: Synthetic oligonucleotide
  misc_feature 1..20: note = Target: SCN10A; (+) strand; PAM type: YTN; PAM sequence: TTT
  source 1..20: mol_type = other DNA
tttctttgctttactatgct

SEQ ID NO: 73840 - DNA, 20 bp, synthetic construct
  misc_feature 1..20: note = Description of Artificial Sequence: Synthetic oligonucleotide
  misc_feature 1..20: note = Target: SCN10A; (+) strand; PAM type: YTN; PAM sequence: TTT
  source 1..20: mol_type = other DNA
ttctttgctttactatgctg

SEQ ID NO: 73841 - DNA, 20 bp, synthetic construct
  misc_feature 1..20: note = Description of Artificial Sequence: Synthetic oligonucleotide
  misc_feature 1..20: note = Target: SCN10A; (+) strand; PAM type: YTN; PAM sequence: TTT
  source 1..20: mol_type = other DNA
tctttgctttactatgctgg

SEQ ID NO: 73842 - DNA, 20 bp, synthetic construct
  misc_feature 1..20: note = Description of Artificial Sequence: Synthetic oligonucleotide
  misc_feature 1..20: note = Target: SCN10A; (+) strand; PAM type: YTN; PAM sequence: TTT
  source 1..20: mol_type = other DNA
ctttgctttactatgctggc

SEQ ID NO: 73843 - DNA, 20 bp, synthetic construct
  misc_feature 1..20: note = Description of Artificial Sequence: Synthetic oligonucleotide
  misc_feature 1..20: note = Target: SCN10A; (+) strand; PAM type: YTN; PAM sequence: TTC
  source 1..20: mol_type = other DNA
tttgctttactatgctggct

SEQ ID NO: 73844 - DNA, 20 bp, synthetic construct
  misc_feature 1..20: note = Description of Artificial Sequence: Synthetic oligonucleotide
  misc_feature 1..20: note = Target: SCN10A; (+) strand; PAM type: YTN; PAM sequence: CTT
  source 1..20: mol_type = other DNA
tgctttactatgctggctga

SEQ ID NO: 73845 - DNA, 20 bp, synthetic construct
  misc_feature 1..20: note = Description of Artificial Sequence: Synthetic oligonucleotide
  misc_feature 1..20: note = Target: SCN10A; (+) strand; PAM type: YTN; PAM sequence: TTT
  source 1..20: mol_type = other DNA
gctttactatgctggctgag

SEQ ID NO: 73846 - DNA, 20 bp, synthetic construct
  misc_feature 1..20: note = Description of Artificial Sequence: Synthetic oligonucleotide
  misc_feature 1..20: note = Target: SCN10A; (+) strand; PAM type: YTN; PAM sequence: TTG
  source 1..20: mol_type = other DNA
ctttactatgctggctgaga

SEQ ID NO: 73847 - DNA, 20 bp, synthetic construct
  misc_feature 1..20: note = Description of Artificial Sequence: Synthetic oligonucleotide
  misc_feature 1..20: note = Target: SCN10A; (+) strand; PAM type: YTN; PAM sequence: CTT
  source 1..20: mol_type = other DNA
tactatgctggctgagacct

SEQ ID NO: 73848 - DNA, 20 bp, synthetic construct
  misc_feature 1..20: note = Description of Artificial Sequence: Synthetic oligonucleotide
  misc_feature 1..20: note = Target: SCN10A; (+) strand; PAM type: YTN; PAM sequence: TTT
  source 1..20: mol_type = other DNA
actatgctggctgagacctc

SEQ ID NO: 73849 - DNA, 20 bp, synthetic construct
  misc_feature 1..20: note = Description of Artificial Sequence: Synthetic oligonucleotide
  misc_feature 1..20: note = Target: SCN10A; (+) strand; PAM type: YTN; PAM sequence: TTA
  source 1..20: mol_type = other DNA
ctatgctggctgagacctcc

SEQ ID NO: 73850 - DNA, 20 bp, synthetic construct
  misc_feature 1..20: note = Description of Artificial Sequence: Synthetic oligonucleotide
  misc_feature 1..20: note = Target: SCN10A; (+) strand; PAM type: YTN; PAM sequence: CTA
  source 1..20: mol_type = other DNA
tgctggctgagacctccttt

SEQ ID NO: 73851 - DNA, 20 bp, synthetic construct
  misc_feature 1..20: note = Description of Artificial Sequence: Synthetic oligonucleotide
  misc_feature 1..20: note = Target: SCN10A; (+) strand; PAM type: YTN; PAM sequence: CTG
  source 1..20: mol_type = other DNA
gctgagacctcctttacaaa

SEQ ID NO: 73852 - DNA, 20 bp, synthetic construct
  misc_feature 1..20: note = Description of Artificial Sequence: Synthetic oligonucleotide
  misc_feature 1..20: note = Target: SCN10A; (+) strand; PAM type: YTN; PAM sequence: CTG
  source 1..20: mol_type = other DNA
agacctcctttacaaagtgg

SEQ ID NO: 73853 - DNA, 20 bp, synthetic construct
  misc_feature 1..20: note = Description of Artificial Sequence: Synthetic oligonucleotide
  misc_feature 1..20: note = Target: SCN10A; (+) strand; PAM type: YTN; PAM sequence: CTC
  source 1..20: mol_type = other DNA
ctttacaaagtggaactgag

SEQ ID NO: 73854 - DNA, 20 bp, synthetic construct
  misc_feature 1..20: note = Description of Artificial Sequence: Synthetic oligonucleotide
  misc_feature 1..20: note = Target: SCN10A; (+) strand; PAM type: YTN; PAM sequence: CTT
  source 1..20: mol_type = other DNA
tacaaagtggaactgagaag

SEQ ID NO: 73855 - DNA, 20 bp, synthetic construct
  misc_feature 1..20: note = Description of Artificial Sequence: Synthetic oligonucleotide
  misc_feature 1..20: note = Target: SCN10A; (+) strand; PAM type: YTN; PAM sequence: TTT
  source 1..20: mol_type = other DNA
acaaagtggaactgagaaga

SEQ ID NO: 73856 - DNA, 20 bp, synthetic construct
  misc_feature 1..20: note = Description of Artificial Sequence: Synthetic oligonucleotide
  misc_feature 1..20: note = Target: SCN10A; (+) strand; PAM type: YTN; PAM sequence: TTA
  source 1..20: mol_type = other DNA
caaagtggaactgagaagaa

SEQ ID NO: 73857 - DNA, 20 bp, synthetic construct
  misc_feature 1..20: note = Description of Artificial Sequence: Synthetic oligonucleotide
  misc_feature 1..20: note = Target: SCN10A; (+) strand; PAM type: YTN; PAM sequence: CTG
  source 1..20: mol_type = other DNA
agaagaacagacatctttgg

SEQ ID NO: 73858 - DNA, 20 bp, synthetic construct
  misc_feature 1..20: note = Description of Artificial Sequence: Synthetic oligonucleotide
  misc_feature 1..20: note = Target: SCN10A; (+) strand; PAM type: YTN; PAM sequence: CTT
  source 1..20: mol_type = other DNA
tggtttttttttcttttgat

SEQ ID NO: 73859 - DNA, 20 bp, synthetic construct
  misc_feature 1..20: note = Description of Artificial Sequence: Synthetic oligonucleotide
  misc_feature 1..20: note = Target: SCN10A; (+) strand; PAM type: YTN; PAM sequence: TTT
  source 1..20: mol_type = other DNA
ggtttttttttcttttgatc

SEQ ID NO: 73860 - DNA, 20 bp, synthetic construct
  misc_feature 1..20: note = Description of Artificial Sequence: Synthetic oligonucleotide
  misc_feature 1..20: note = Target: SCN10A; (+) strand; PAM type: YTN; PAM sequence: TTG
  source 1..20: mol_type = other DNA
gtttttttttcttttgatct

SEQ ID NO: 73861 - DNA, 20 bp, synthetic construct
  misc_feature 1..20: note = Description of Artificial Sequence: Synthetic oligonucleotide
  misc_feature 1..20: note = Target: SCN10A; (+) strand; PAM type: YTN; PAM sequence: TTT
  source 1..20: mol_type = other DNA
ttttttcttttgatctcaaa

SEQ ID NO: 73862 - DNA, 20 bp, synthetic construct
  misc_feature 1..20: note = Description of Artificial Sequence: Synthetic oligonucleotide
  misc_feature 1..20: note = Target: SCN10A; (+) strand; PAM type: YTN; PAM sequence: TTT
  source 1..20: mol_type = other DNA
tttttcttttgatctcaaag

SEQ ID NO: 73863 - DNA, 20 bp, synthetic construct
  misc_feature 1..20: note = Description of Artificial Sequence: Synthetic oligonucleotide
  misc_feature 1..20: note = Target: SCN10A; (+) strand; PAM type: YTN; PAM sequence: TTT
  source 1..20: mol_type = other DNA
ttttcttttgatctcaaagg

SEQ ID NO: 73864 - DNA, 20 bp, synthetic construct
  misc_feature 1..20: note = Description of Artificial Sequence: Synthetic oligonucleotide
  misc_feature 1..20: note = Target: SCN10A; (+) strand; PAM type: YTN; PAM sequence: TTT
  source 1..20: mol_type = other DNA
tttcttttgatctcaaaggg

SEQ ID NO: 73865 - DNA, 20 bp, synthetic construct
  misc_feature 1..20: note = Description of Artificial Sequence: Synthetic oligonucleotide
  misc_feature 1..20: note = Target: SCN10A; (+) strand; PAM type: YTN; PAM sequence: TTT
  source 1..20: mol_type = other DNA
ttcttttgatctcaaaggga

SEQ ID NO: 73866 - DNA, 20 bp, synthetic construct
  misc_feature 1..20: note = Description of Artificial Sequence: Synthetic oligonucleotide
  misc_feature 1..20: note = Target: SCN10A; (+) strand; PAM type: YTN; PAM sequence: TTT
  source 1..20: mol_type = other DNA
tcttttgatctcaaagggaa

SEQ ID NO: 73867 - DNA, 20 bp, synthetic construct
  misc_feature 1..20: note = Description of Artificial Sequence: Synthetic oligonucleotide
  misc_feature 1..20: note = Target: SCN10A; (+) strand; PAM type: YTN; PAM sequence: TTT
  source 1..20: mol_type = other DNA
cttttgatctcaaagggaaa

SEQ ID NO: 73868 - DNA, 20 bp, synthetic construct
  misc_feature 1..20: note = Description of Artificial Sequence: Synthetic oligonucleotide
  misc_feature 1..20: note = Target: SCN10A; (+) strand; PAM type: YTN; PAM sequence: TTC
  source 1..20: mol_type = other DNA
ttttgatctcaaagggaaag

SEQ ID NO: 73869 - DNA, 20 bp, synthetic construct
  misc_feature 1..20: note = Description of Artificial Sequence: Synthetic oligonucleotide
  misc_feature 1..20: note = Target: SCN10A; (+) strand; PAM type: YTN; PAM sequence: CTT
  source 1..20: mol_type = other DNA
ttgatctcaaagggaaagct

SEQ ID NO: 73870 - DNA, 20 bp, synthetic construct
  misc_feature 1..20: note = Description of Artificial Sequence: Synthetic oligonucleotide
  misc_feature 1..20: note = Target: SCN10A; (+) strand; PAM type: YTN; PAM sequence: TTT
  source 1..20: mol_type = other DNA
tgatctcaaagggaaagctt

SEQ ID NO: 73871 - DNA, 20 bp, synthetic construct
  misc_feature 1..20: note = Description of Artificial Sequence: Synthetic oligonucleotide
  misc_feature 1..20: note = Target: SCN10A; (+) strand; PAM type: YTN; PAM sequence: TTT
  source 1..20: mol_type = other DNA
gatctcaaagggaaagcttt

SEQ ID NO: 73872 - DNA, 20 bp, synthetic construct
  misc_feature 1..20: note = Description of Artificial Sequence: Synthetic oligonucleotide
  misc_feature 1..20: note = Target: SCN10A; (+) strand; PAM type: YTN; PAM sequence: TTG
  source 1..20: mol_type = other DNA
atctcaaagggaaagctttc

SEQ ID NO: 73873 - DNA, 20 bp, synthetic construct
  misc_feature 1..20: note = Description of Artificial Sequence: Synthetic oligonucleotide
  misc_feature 1..20: note = Target: SCN10A; (+) strand; PAM type: YTN; PAM sequence: CTC
  source 1..20: mol_type = other DNA
aaagggaaagctttccatgt

SEQ ID NO: 73874 - DNA, 20 bp, synthetic construct
  misc_feature 1..20: note = Description of Artificial Sequence: Synthetic oligonucleotide
  misc_feature 1..20: note = Target: SCN10A; (+) strand; PAM type: YTN; PAM sequence: CTT
  source 1..20: mol_type = other DNA
tccatgttcacaattaagta

SEQ ID NO: 73875 - DNA, 20 bp, synthetic construct
  misc_feature 1..20: note = Description of Artificial Sequence: Synthetic oligonucleotide
  misc_feature 1..20: note = Target: SCN10A; (+) strand; PAM type: YTN; PAM sequence: TTT
  source 1..20: mol_type = other DNA
ccatgttcacaattaagtat

SEQ ID NO: 73876 - DNA, 20 bp, synthetic construct
  misc_feature 1..20: note = Description of Artificial Sequence: Synthetic oligonucleotide
  misc_feature 1..20: note = Target: SCN10A; (+) strand; PAM type: YTN; PAM sequence: TTC
  source 1..20: mol_type = other DNA
catgttcacaattaagtatg

SEQ ID NO: 73877 - DNA, 20 bp, synthetic construct
  misc_feature 1..20: note = Description of Artificial Sequence: Synthetic oligonucleotide
  misc_feature 1..20: note = Target: SCN10A; (+) strand; PAM type: YTN; PAM sequence: TTC
  source 1..20: mol_type = other DNA
acaattaagtatgacgcttg

SEQ ID NO: 73878 - DNA, 20 bp, synthetic construct
  misc_feature 1..20: note = Description of Artificial Sequence: Synthetic oligonucleotide
  misc_feature 1..20: note = Target: SCN10A; (+) strand; PAM type: YTN; PAM sequence: TTA
  source 1..20: mol_type = other DNA
agtatgacgcttgatacttt

SEQ ID NO: 73879 - DNA, 20 bp, synthetic construct
  misc_feature 1..20: note = Description of Artificial Sequence: Synthetic oligonucleotide
  misc_feature 1..20: note = Target: SCN10A; (+) strand; PAM type: YTN; PAM sequence: CTT
  source 1..20: mol_type = other DNA
gatactttaaaacaatgaat

SEQ ID NO: 73880 - DNA, 20 bp, synthetic construct
  misc_feature 1..20: note = Description of Artificial Sequence: Synthetic oligonucleotide
  misc_feature 1..20: note = Target: SCN10A; (+) strand; PAM type: YTN; PAM sequence: TTG
  source 1..20: mol_type = other DNA
atactttaaaacaatgaata

SEQ ID NO: 73881 - DNA, 20 bp, synthetic construct
  misc_feature 1..20: note = Description of Artificial Sequence: Synthetic oligonucleotide
  misc_feature 1..20: note = Target: SCN10A; (+) strand; PAM type: YTN; PAM sequence: CTT
  source 1..20: mol_type = other DNA
taaaacaatgaatacccttt

SEQ ID NO: 73882 - DNA, 20 bp, synthetic construct
  misc_feature 1..20: note = Description of Artificial Sequence: Synthetic oligonucleotide
  misc_feature 1..20: note = Target: SCN10A; (+) strand; PAM type: YTN; PAM sequence: TTT
  source 1..20: mol_type = other DNA
aaaacaatgaatacccttta

SEQ ID NO: 73883 - DNA, 20 bp, synthetic construct
  misc_feature 1..20: note = Description of Artificial Sequence: Synthetic oligonucleotide
  misc_feature 1..20: note = Target: SCN10A; (+) strand; PAM type: YTN; PAM sequence: TTA
  source 1..20: mol_type = other DNA
aaacaatgaataccctttat

SEQ ID NO: 73884 - DNA, 20 bp, synthetic construct
  misc_feature 1..20: note = Description of Artificial Sequence: Synthetic oligonucleotide
  misc_feature 1..20: note = Target: SCN10A; (+) strand; PAM type: YTN; PAM sequence: CTT
  source 1..20: mol_type = other DNA
tatcagagtgatgcaatccc

SEQ ID NO: 73885 - DNA, 20 bp, synthetic construct
  misc_feature 1..20: note = Description of Artificial Sequence: Synthetic oligonucleotide
  misc_feature 1..20: note = Target: SCN10A; (+) strand; PAM type: YTN; PAM sequence: TTT
  source 1..20: mol_type = other DNA
atcagagtgatgcaatcccc

SEQ ID NO: 73886 - DNA, 20 bp, synthetic construct
  misc_feature 1..20: note = Description of Artificial Sequence: Synthetic oligonucleotide
  misc_feature 1..20: note = Target: SCN10A; (+) strand; PAM type: YTN; PAM sequence: TTA
  source 1..20: mol_type = other DNA
tcagagtgatgcaatcccct

SEQ ID NO: 73887 - DNA, 20 bp, synthetic construct
  misc_feature 1..20: note = Description of Artificial Sequence: Synthetic oligonucleotide
  misc_feature 1..20: note = Target: SCN10A; (+) strand; PAM type: YTN; PAM sequence: CTT
  source 1..20: mol_type = other DNA
tttaaaattattatacttta

SEQ ID NO: 73888 - DNA, 20 bp, synthetic construct
  misc_feature 1..20: note = Description of Artificial Sequence: Synthetic oligonucleotide
  misc_feature 1..20: note = Target: SCN10A; (+) strand; PAM type: YTN; PAM sequence: TTT
  source 1..20: mol_type = other DNA
ttaaaattattatactttaa

SEQ ID NO: 73889 - DNA, 20 bp, synthetic construct
  misc_feature 1..20: note = Description of Artificial Sequence: Synthetic oligonucleotide
  misc_feature 1..20: note = Target: SCN10A; (+) strand; PAM type: YTN; PAM sequence: TTT
  source 1..20: mol_type = other DNA
taaaattattatactttaag

SEQ ID NO: 73890 - DNA, 20 bp, synthetic construct
  misc_feature 1..20: note = Description of Artificial Sequence: Synthetic oligonucleotide
  misc_feature 1..20: note = Target: SCN10A; (+) strand; PAM type: YTN; PAM sequence: TTT
  source 1..20: mol_type = other DNA
aaaattattatactttaagt

SEQ ID NO: 73891 - DNA, 20 bp, synthetic construct
  misc_feature 1..20: note = Description of Artificial Sequence: Synthetic oligonucleotide
  misc_feature 1..20: note = Target: SCN10A; (+) strand; PAM type: YTN; PAM sequence: TTA
  source 1..20: mol_type = other DNA
aaattattatactttaagtt

SEQ ID NO: 73892 - DNA, 20 bp, synthetic construct
  misc_feature 1..20: note = Description of Artificial Sequence: Synthetic oligonucleotide
  misc_feature 1..20: note = Target: SCN10A; (+) strand; PAM type: YTN; PAM sequence: TTA
  source 1..20: mol_type = other DNA
ttatactttaagttctgggg

SEQ ID NO: 73893 - DNA, 20 bp, synthetic construct
  misc_feature 1..20: note = Description of Artificial Sequence: Synthetic oligonucleotide
  misc_feature 1..20: note = Target: SCN10A; (+) strand; PAM type: YTN; PAM sequence: TTA
  source 1..20: mol_type = other DNA
tactttaagttctggggtac

SEQ ID NO: 73894 - DNA, 20 bp, synthetic construct
  misc_feature 1..20: note = Description of Artificial Sequence: Synthetic oligonucleotide
  misc_feature 1..20: note = Target: SCN10A; (+) strand; PAM type: YTN; PAM sequence: CTT
  source 1..20: mol_type = other DNA
taagttctggggtacatgtg

SEQ ID NO: 73895 - DNA, 20 bp, synthetic construct
  misc_feature 1..20: note = Description of Artificial Sequence: Synthetic oligonucleotide
  misc_feature 1..20: note = Target: SCN10A; (+) strand; PAM type: YTN; PAM sequence: TTT
  source 1..20: mol_type = other DNA
aagttctggggtacatgtgc

SEQ ID NO: 73896 - DNA, 20 bp, synthetic construct
  misc_feature 1..20: note = Description of Artificial Sequence: Synthetic oligonucleotide
  misc_feature 1..20: note = Target: SCN10A; (+) strand; PAM type: YTN; PAM sequence: TTA
  source 1..20: mol_type = other DNA
agttctggggtacatgtgca

SEQ ID NO: 73897 - DNA, 20 bp, synthetic construct
  misc_feature 1..20: note = Description of Artificial Sequence: Synthetic oligonucleotide
  misc_feature 1..20: note = Target: SCN10A; (+) strand; PAM type: YTN; PAM sequence: TTC
  source 1..20: mol_type = other DNA
tggggtacatgtgcagaacg

SEQ ID NO: 73898 - DNA, 20 bp, synthetic construct
  misc_feature 1..20: note = Description of Artificial Sequence: Synthetic oligonucleotide
  misc_feature 1..20: note = Target: SCN10A; (+) strand; PAM type: YTN; PAM sequence: CTG
  source 1..20: mol_type = other DNA
gggtacatgtgcagaacgtg

SEQ ID NO: 73899 - DNA, 20 bp, synthetic construct
  misc_feature 1..20: note = Description of Artificial Sequence: Synthetic oligonucleotide
  misc_feature 1..20: note = Target: SCN10A; (+) strand; PAM type: YTN; PAM sequence: TTT
  source 1..20: mol_type = other DNA
gttacataggtgtacccgtg

SEQ ID NO: 73900 - DNA, 20 bp, synthetic construct
  misc_feature 1..20: note = Description of Artificial Sequence: Synthetic oligonucleotide
  misc_feature 1..20: note = Target: SCN10A; (+) strand; PAM type: YTN; PAM sequence: TTG
  source 1..20: mol_type = other DNA
ttacataggtgtacccgtgc

SEQ ID NO: 73901 - DNA, 20 bp, synthetic construct
  misc_feature 1..20: note = Description of Artificial Sequence: Synthetic oligonucleotide
  misc_feature 1..20: note = Target: SCN10A; (+) strand; PAM type: YTN; PAM sequence: TTA
  source 1..20: mol_type = other DNA
cataggtgtacccgtgccat

SEQ ID NO: 73902 - DNA, 20 bp, synthetic construct
  misc_feature 1..20: note = Description of Artificial Sequence: Synthetic oligonucleotide
  misc_feature 1..20: note = Target: SCN10A; (+) strand; PAM type: YTN; PAM sequence: TTT
  source 1..20: mol_type = other DNA
gctgcacccttcaacccgtc

SEQ ID NO: 73903 - DNA, 20 bp, synthetic construct
  misc_feature 1..20: note = Description of Artificial Sequence: Synthetic oligonucleotide
  misc_feature 1..20: note = Target: SCN10A; (+) strand; PAM type: YTN; PAM sequence: TTG
  source 1..20: mol_type = other DNA
ctgcacccttcaacccgtca

SEQ ID NO: 73904 - DNA, 20 bp, synthetic construct
  misc_feature 1..20: note = Description of Artificial Sequence: Synthetic oligonucleotide
  misc_feature 1..20: note = Target: SCN10A; (+) strand; PAM type: YTN; PAM sequence: CTG
  source 1..20: mol_type = other DNA
cacccttcaacccgtcattt

SEQ ID NO: 73905 - DNA, 20 bp, synthetic construct
  misc_feature 1..20: note = Description of Artificial Sequence: Synthetic oligonucleotide
  misc_feature 1..20: note = Target: SCN10A; (+) strand; PAM type: YTN; PAM sequence: CTT
  source 1..20: mol_type = other DNA
caacccgtcatttacattag

SEQ ID NO: 73906 - DNA, 20 bp, synthetic construct
  misc_feature 1..20: note = Description of Artificial Sequence: Synthetic oligonucleotide
  misc_feature 1..20: note = Target: SCN10A; (+) strand; PAM type: YTN; PAM sequence: TTC
  source 1..20: mol_type = other DNA
aacccgtcatttacattagg

SEQ ID NO: 73907 - DNA, 20 bp, synthetic construct
  misc_feature 1..20: note = Description of Artificial Sequence: Synthetic oligonucleotide
  misc_feature 1..20: note = Target: SCN10A; (+) strand; PAM type: YTN; PAM sequence: TTT
  source 1..20: mol_type = other DNA
acattaggtatttctcctaa

SEQ ID NO: 73908 - DNA, 20 bp, synthetic construct
  misc_feature 1..20: note = Description of Artificial Sequence: Synthetic oligonucleotide
  misc_feature 1..20: note = Target: SCN10A; (+) strand; PAM type: YTN; PAM sequence: TTA
  source 1..20: mol_type = other DNA
cattaggtatttctcctaat

SEQ ID NO: 73909 - DNA, 20 bp, synthetic construct
  misc_feature 1..20: note = Description of Artificial Sequence: Synthetic oligonucleotide
  misc_feature 1..20: note = Target: SCN10A; (+) strand; PAM type: YTN; PAM sequence: TTA
  source 1..20: mol_type = other DNA
ggtatttctcctaatgctat

SEQ ID NO: 73910 - DNA, 20 bp, synthetic construct
  misc_feature 1..20: note = Description of Artificial Sequence: Synthetic oligonucleotide
  misc_feature 1..20: note = Target: SCN10A; (+) strand; PAM type: YTN; PAM sequence: TTT
  source 1..20: mol_type = other DNA
ctcctaatgctatccctccc

SEQ ID NO: 73911 - DNA, 20 bp, synthetic construct
  misc_feature 1..20: note = Description of Artificial Sequence: Synthetic oligonucleotide
  misc_feature 1..20: note = Target: SCN10A; (+) strand; PAM type: YTN; PAM sequence: TTC
  source 1..20: mol_type = other DNA
tcctaatgctatccctcccc

SEQ ID NO: 73912 - DNA, 20 bp, synthetic construct
  misc_feature 1..20: note = Description of Artificial Sequence: Synthetic oligonucleotide
  misc_feature 1..20: note = Target: SCN10A; (+) strand; PAM type: YTN; PAM sequence: CTC
  source 1..20: mol_type = other DNA
ctaatgctatccctccccta

SEQ ID NO: 73913 - DNA, 20 bp, synthetic construct
  misc_feature 1..20: note = Description of Artificial Sequence: Synthetic oligonucleotide
  misc_feature 1..20: note = Target: SCN10A; (+) strand; PAM type: YTN; PAM sequence: CTA
  source 1..20: mol_type = other DNA
atgctatccctcccctagcc

SEQ ID NO: 73914 - DNA, 20 bp, synthetic construct
  misc_feature 1..20: note = Description of Artificial Sequence: Synthetic oligonucleotide
  misc_feature 1..20: note = Target: SCN10A; (+) strand; PAM type: YTN; PAM sequence: CTA
  source 1..20: mol_type = other DNA
tccctcccctagccccccac

SEQ ID NO: 73915 - DNA, 20 bp, synthetic construct
  misc_feature 1..20: note = Description of Artificial Sequence: Synthetic oligonucleotide
  misc_feature 1..20: note = Target: SCN10A; (+) strand; PAM type: YTN; PAM sequence: CTC
  source 1..20: mol_type = other DNA
ccctagccccccacccctca

SEQ ID NO: 73916 - DNA, 20 bp, synthetic construct
  misc_feature 1..20: note = Description of Artificial Sequence: Synthetic oligonucleotide
  misc_feature 1..20: note = Target: SCN10A; (+) strand; PAM type: YTN; PAM sequence: CTA
  source 1..20: mol_type = other DNA
gccccccacccctcaacagg

SEQ ID NO: 73917 - DNA, 20 bp, synthetic construct
  misc_feature 1..20: note = Description of Artificial Sequence: Synthetic oligonucleotide
  misc_feature 1..20: note = Target: SCN10A; (+) strand; PAM type: YTN; PAM sequence: CTC
  source 1..20: mol_type = other DNA
aacaggccccagtgtgttcc

SEQ ID NO: 73918 - DNA, 20 bp, synthetic construct
  misc_feature 1..20: note = Description of Artificial Sequence: Synthetic oligonucleotide
  misc_feature 1..20: note = Target: SCN10A; (+) strand; PAM type: YTN; PAM sequence: TTC
  source 1..20: mol_type = other DNA
ccctccctgtgtccatgtgt

SEQ ID NO: 73919 - DNA, 20 bp, synthetic construct
  misc_feature 1..20: note = Description of Artificial Sequence: Synthetic oligonucleotide
  misc_feature 1..20: note = Target: SCN10A; (+) strand; PAM type: YTN; PAM sequence: CTC
  source 1..20: mol_type = other DNA
cctgtgtccatgtgttctca

SEQ ID NO: 73920 - DNA, 20 bp, synthetic construct
  misc_feature 1..20: note = Description of Artificial Sequence: Synthetic oligonucleotide
  misc_feature 1..20: note = Target: SCN10A; (+) strand; PAM type: YTN; PAM sequence: CTG
  source 1..20: mol_type = other DNA
tgtccatgtgttctcattgt

SEQ ID NO: 73921 - DNA, 20 bp, synthetic construct
  misc_feature 1..20: note = Description of Artificial Sequence: Synthetic oligonucleotide
  misc_feature 1..20: note = Target: SCN10A; (+) strand; PAM type: YTN; PAM sequence: TTC
  source 1..20: mol_type = other DNA
tcattgttcaactcccactt

SEQ ID NO: 73922 - DNA, 20 bp, synthetic construct
  misc_feature 1..20: note = Description of Artificial Sequence: Synthetic oligonucleotide
  misc_feature 1..20: note = Target: SCN10A; (+) strand; PAM type: YTN; PAM sequence: CTC
  source 1..20: mol_type = other DNA
attgttcaactcccacttat

SEQ ID NO: 73923 - DNA, 20 bp, synthetic construct
  misc_feature 1..20: note = Description of Artificial Sequence: Synthetic oligonucleotide
  misc_feature 1..20: note = Target: SCN10A; (+) strand; PAM type: YTN; PAM sequence: TTG
  source 1..20: mol_type = other DNA
ttcaactcccacttatgagt

SEQ ID NO: 73924 - DNA, 20 bp, synthetic construct
  misc_feature 1..20: note = Description of Artificial Sequence: Synthetic oligonucleotide
  misc_feature 1..20: note = Target: SCN10A; (+) strand; PAM type: YTN; PAM sequence: TTC
  source 1..20: mol_type = other DNA
aactcccacttatgagtgag

SEQ ID NO: 73925 - DNA, 20 bp, synthetic construct
  misc_feature 1..20: note = Description of Artificial Sequence: Synthetic oligonucleotide
  misc_feature 1..20: note = Target: SCN10A; (+) strand; PAM type: YTN; PAM sequence: CTC
  source 1..20: mol_type = other DNA
ccacttatgagtgagaacat

SEQ ID NO: 73926 - DNA, 20 bp, synthetic construct
  misc_feature 1..20: note = Description of Artificial Sequence: Synthetic oligonucleotide
  misc_feature 1..20: note = Target: SCN10A; (+) strand; PAM type: YTN; PAM sequence: CTT
  source 1..20: mol_type = other DNA
atgagtgagaacatacggtg

SEQ ID NO: 73927 - DNA, 20 bp, synthetic construct
  misc_feature 1..20: note = Description of Artificial Sequence: Synthetic oligonucleotide
  misc_feature 1..20: note = Target: SCN10A; (+) strand; PAM type: YTN; PAM sequence: TTA
  source 1..20: mol_type = other DNA
tgagtgagaacatacggtgt

SEQ ID NO: 73928 - DNA, 20 bp, synthetic construct
  misc_feature 1..20: note = Description of Artificial Sequence: Synthetic oligonucleotide
  misc_feature 1..20: note = Target: SCN10A; (+) strand; PAM type: YTN; PAM sequence: TTT
  source 1..20: mol_type = other DNA
ggttttctgttcttgtgtta

SEQ ID NO: 73929 - DNA, 20 bp, synthetic construct
  misc_feature 1..20: note = Description of Artificial Sequence: Synthetic oligonucleotide
  misc_feature 1..20: note = Target: SCN10A; (+) strand; PAM type: YTN; PAM sequence: TTG
  source 1..20: mol_type = other DNA
gttttctgttcttgtgttag

SEQ ID NO: 73930 - DNA, 20 bp, synthetic construct
  misc_feature 1..20: note = Description of Artificial Sequence: Synthetic oligonucleotide
  misc_feature 1..20: note = Target: SCN10A; (+) strand; PAM type: YTN; PAM sequence: TTT
  source 1..20: mol_type = other DNA
tctgttcttgtgttagtttg

SEQ ID NO: 73931 - DNA, 20 bp, synthetic construct
  misc_feature 1..20: note = Description of Artificial Sequence: Synthetic oligonucleotide
  misc_feature 1..20: note = Target: SCN10A; (+) strand; PAM type: YTN; PAM sequence: TTT
  source 1..20: mol_type = other DNA
ctgttcttgtgttagtttgc

SEQ ID NO: 73932 - DNA, 20 bp, synthetic construct
  misc_feature 1..20: note = Description of Artificial Sequence: Synthetic oligonucleotide
  misc_feature 1..20: note = Target: SCN10A; (+) strand; PAM type: YTN; PAM sequence: TTC
  source 1..20: mol_type = other DNA
tgttcttgtgttagtttgct

SEQ ID NO: 73933 - DNA, 20 bp, synthetic construct
  misc_feature 1..20: note = Description of Artificial Sequence: Synthetic oligonucleotide
  misc_feature 1..20: note = Target: SCN10A; (+) strand; PAM type: YTN; PAM sequence: CTG
  source 1..20: mol_type = other DNA
ttcttgtgttagtttgctga

SEQ ID NO: 73934 - DNA, 20 bp, synthetic construct
  misc_feature 1..20: note = Description of Artificial Sequence: Synthetic oligonucleotide
  misc_feature 1..20: note = Target: SCN10A; (+) strand; PAM type: YTN; PAM sequence: TTC
  source 1..20: mol_type = other DNA
ttgtgttagtttgctgagaa

SEQ ID NO: 73935 - DNA, 20 bp, synthetic construct
  misc_feature 1..20: note = Description of Artificial Sequence: Synthetic oligonucleotide
  misc_feature 1..20: note = Target: SCN10A; (+) strand; PAM type: YTN; PAM sequence: CTT
  source 1..20: mol_type = other DNA
gtgttagtttgctgagaatg

SEQ ID NO: 73936 - DNA, 20 bp, synthetic construct
  misc_feature 1..20: note = Description of Artificial Sequence: Synthetic oligonucleotide
  misc_feature 1..20: note = Target: SCN10A; (+) strand; PAM type: YTN; PAM sequence: TTG
  source 1..20: mol_type = other DNA
tgttagtttgctgagaatga

SEQ ID NO: 73937 - DNA, 20 bp, synthetic construct
  misc_feature 1..20: note = Description of Artificial Sequence: Synthetic oligonucleotide
  misc_feature 1..20: note = Target: SCN10A; (+) strand; PAM type: YTN; PAM sequence: TTA
  source 1..20: mol_type = other DNA
gtttgctgagaatgatggtt

SEQ ID NO: 73938 - DNA, 20 bp, synthetic construct
  misc_feature 1..20: note = Description of Artificial Sequence: Synthetic oligonucleotide
  misc_feature 1..20: note = Target: SCN10A; (+) strand; PAM type: YTN; PAM sequence: TTT
  source 1..20: mol_type = other DNA
gctgagaatgatggtttcca

SEQ ID NO: 73939 - DNA, 20 bp, synthetic construct
  misc_feature 1..20: note = Description of Artificial Sequence: Synthetic oligonucleotide
  misc_feature 1..20: note = Target: SCN10A; (+) strand; PAM type: YTN; PAM sequence: TTG
  source 1..20: mol_type = other DNA
ctgagaatgatggtttccag

SEQ ID NO: 73940 - DNA, 20 bp, synthetic construct
  misc_feature 1..20: note = Description of Artificial Sequence: Synthetic oligonucleotide
  misc_feature 1..20: note = Target: SCN10A; (+) strand; PAM type: YTN; PAM sequence: CTG
  source 1..20: mol_type = other DNA
agaatgatggtttccagctt

SEQ ID NO: 73941 - DNA, 20 bp, synthetic construct
  misc_feature 1..20: note = Description of Artificial Sequence: Synthetic oligonucleotide
  misc_feature 1..20: note = Target: SCN10A; (+) strand; PAM type: YTN; PAM sequence: TTT
  source 1..20: mol_type = other DNA
ccagcttcatccatgtccct

SEQ ID NO: 73942 - DNA, 20 bp, synthetic construct
  misc_feature 1..20: note = Description of Artificial Sequence: Synthetic oligonucleotide
  misc_feature 1..20: note = Target: SCN10A; (+) strand; PAM type: YTN; PAM sequence: TTC
  source 1..20: mol_type = other DNA
cagcttcatccatgtccctg

SEQ ID NO: 73943 - DNA, 20 bp, synthetic construct
  misc_feature 1..20: note = Description of Artificial Sequence: Synthetic oligonucleotide
  misc_feature 1..20: note = Target: SCN10A; (+) strand; PAM type: YTN; PAM sequence: CTT
  source 1..20: mol_type = other DNA
catccatgtccctgcaaagg

SEQ ID NO: 73944 - DNA, 20 bp, synthetic construct
  misc_feature 1..20: note = Description of Artificial Sequence: Synthetic oligonucleotide
  misc_feature 1..20: note = Target: SCN10A; (+) strand; PAM type: YTN; PAM sequence: TTC
  source 1..20: mol_type = other DNA
atccatgtccctgcaaagga

SEQ ID NO: 73945 - DNA, 20 bp, synthetic construct
  misc_feature 1..20: note = Description of Artificial Sequence: Synthetic oligonucleotide
  misc_feature 1..20: note = Target: SCN10A; (+) strand; PAM type: YTN; PAM sequence: CTG
  source 1..20: mol_type = other DNA
caaaggacatgaactcatcc

SEQ ID NO: 73946 - DNA, 20 bp, synthetic construct
  misc_feature 1..20: note = Description of Artificial Sequence: Synthetic oligonucleotide
  misc_feature 1..20: note = Target: SCN10A; (+) strand; PAM type: YTN; PAM sequence: CTC
  source 1..20: mol_type = other DNA
atccttttttatgactgcat

SEQ ID NO: 73947 - DNA, 20 bp, synthetic construct
  misc_feature 1..20: note = Description of Artificial Sequence: Synthetic oligonucleotide
  misc_feature 1..20: note = Target: SCN10A; (+) strand; PAM type: YTN; PAM sequence: CTT
  source 1..20: mol_type = other DNA
ttttatgactgcatagcatt

SEQ ID NO: 73948 - DNA, 20 bp, synthetic construct
  misc_feature 1..20: note = Description of Artificial Sequence: Synthetic oligonucleotide
  misc_feature 1..20: note = Target: SCN10A; (+) strand; PAM type: YTN; PAM sequence: TTT
  source 1..20: mol_type = other DNA
tttatgactgcatagcattc

SEQ ID NO: 73949 - DNA, 20 bp, synthetic construct
  misc_feature 1..20: note = Description of Artificial Sequence: Synthetic oligonucleotide
  misc_feature 1..20: note = Target: SCN10A; (+) strand; PAM type: YTN; PAM sequence: TTT
  source 1..20: mol_type = other DNA
ttatgactgcatagcattcc

SEQ ID NO: 73950 - DNA, 20 bp, synthetic construct
  misc_feature 1..20: note = Description of Artificial Sequence: Synthetic oligonucleotide
  misc_feature 1..20: note = Target: SCN10A; (+) strand; PAM type: YTN; PAM sequence: TTT
  source 1..20: mol_type = other DNA
tatgactgcatagcattcca

SEQ ID NO: 73951 - DNA, 20 bp, synthetic construct
  misc_feature 1..20: note = Description of Artificial Sequence: Synthetic oligonucleotide
  misc_feature 1..20: note = Target: SCN10A; (+) strand; PAM type: YTN; PAM sequence: TTT
  source 1..20: mol_type = other DNA
atgactgcatagcattccat

SEQ ID NO: 73952 - DNA, 20 bp, synthetic construct
  misc_feature 1..20: note = Description of Artificial Sequence: Synthetic oligonucleotide
  misc_feature 1..20: note = Target: SCN10A; (+) strand; PAM type: YTN; PAM sequence: TTA
  source 1..20: mol_type = other DNA
tgactgcatagcattccatg

SEQ ID NO: 73953 - DNA, 20 bp, synthetic construct
  misc_feature 1..20: note = Description of Artificial Sequence: Synthetic oligonucleotide
  misc_feature 1..20: note = Target: SCN10A; (+) strand; PAM type: YTN; PAM sequence: CTG
  source 1..20: mol_type = other DNA
catagcattccatggtgtat

SEQ ID NO: 73954 - DNA, 20 bp, synthetic construct
  misc_feature 1..20: note = Description of Artificial Sequence: Synthetic oligonucleotide
  misc_feature 1..20: note = Target: SCN10A; (+) strand; PAM type: YTN; PAM sequence: TTC
  source 1..20: mol_type = other DNA
catggtgtatatgtgccaca

SEQ ID NO: 73955 - DNA, 20 bp, synthetic construct
  misc_feature 1..20: note = Description of Artificial Sequence: Synthetic oligonucleotide
  misc_feature 1..20: note = Target: SCN10A; (+) strand; PAM type: YTN; PAM sequence: TTT
  source 1..20: mol_type = other DNA
attcccttctatttcaactt

SEQ ID NO: 73956 - DNA, 20 bp, synthetic construct
  misc_feature 1..20: note = Description of Artificial Sequence: Synthetic oligonucleotide
  misc_feature 1..20: note = Target: SCN10A; (+) strand; PAM type: YTN; PAM sequence: TTA
  source 1..20: mol_type = other DNA
ttcccttctatttcaacttt

SEQ ID NO: 73957 - DNA, 20 bp, synthetic construct
  misc_feature 1..20: note = Description of Artificial Sequence: Synthetic oligonucleotide
  misc_feature 1..20: note = Target: SCN10A; (+) strand; PAM type: YTN; PAM sequence: TTC
  source 1..20: mol_type = other DNA
ccttctatttcaacttttct

SEQ ID NO: 73958 - DNA, 20 bp, synthetic construct
  misc_feature 1..20: note = Description of Artificial Sequence: Synthetic oligonucleotide
  misc_feature 1..20: note = Target: SCN10A; (+) strand; PAM type: YTN; PAM sequence: CTT
  source 1..20: mol_type = other DNA
ctatttcaacttttctaaga

SEQ ID NO: 73959 - DNA, 20 bp, synthetic construct
  misc_feature 1..20: note = Description of Artificial Sequence: Synthetic oligonucleotide
  misc_feature 1..20: note = Target: SCN10A; (+) strand; PAM type: YTN; PAM sequence: TTC
  source 1..20: mol_type = other DNA
tatttcaacttttctaagaa

SEQ ID NO: 73960 - DNA, 20 bp, synthetic construct
  misc_feature 1..20: note = Description of Artificial Sequence: Synthetic oligonucleotide
  misc_feature 1..20: note = Target: SCN10A; (+) strand; PAM type: YTN; PAM sequence: CTA
  source 1..20: mol_type = other DNA
tttcaacttttctaagaatt

SEQ ID NO: 73961 - DNA, 20 bp, synthetic construct
  misc_feature 1..20: note = Description of Artificial Sequence: Synthetic oligonucleotide
  misc_feature 1..20: note = Target: SCN10A; (+) strand; PAM type: YTN; PAM sequence: TTT
  source 1..20: mol_type = other DNA
caacttttctaagaatttaa

SEQ ID NO: 73962 - DNA, 20 bp, synthetic construct
  misc_feature 1..20: note = Description of Artificial Sequence: Synthetic oligonucleotide
  misc_feature 1..20: note = Target: SCN10A; (+) strand; PAM type: YTN; PAM sequence: TTC
  source 1..20: mol_type = other DNA
aacttttctaagaatttaaa

SEQ ID NO: 73963 - DNA, 20 bp, synthetic construct
  misc_feature 1..20: note = Description of Artificial Sequence: Synthetic oligonucleotide
  misc_feature 1..20: note = Target: SCN10A; (+) strand; PAM type: YTN; PAM sequence: CTT
  source 1..20: mol_type = other DNA
ttctaagaatttaaaattat

SEQ ID NO: 73964 - DNA, 20 bp, synthetic construct
  misc_feature 1..20: note = Description of Artificial Sequence: Synthetic oligonucleotide
  misc_feature 1..20: note = Target: SCN10A; (+) strand; PAM type: YTN; PAM sequence: TTT
  source 1..20: mol_type = other DNA
tctaagaatttaaaattata

SEQ ID NO: 73965 - DNA, 20 bp, synthetic construct
  misc_feature 1..20: note = Description of Artificial Sequence: Synthetic oligonucleotide
  misc_feature 1..20: note = Target: SCN10A; (+) strand; PAM type: YTN; PAM sequence: TTT
  source 1..20: mol_type = other DNA
ctaagaatttaaaattataa

SEQ ID NO: 73966 - DNA, 20 bp, synthetic construct
  misc_feature 1..20: note = Description of Artificial Sequence: Synthetic oligonucleotide
  misc_feature 1..20: note = Target: SCN10A; (+) strand; PAM type: YTN; PAM sequence: TTC
  source 1..20: mol_type = other DNA
taagaatttaaaattataaa

SEQ ID NO: 73967 - DNA, 20 bp, synthetic construct
  misc_feature 1..20: note = Description of Artificial Sequence: Synthetic oligonucleotide
  misc_feature 1..20: note = Target: SCN10A; (+) strand; PAM type: YTN; PAM sequence: CTA
  source 1..20: mol_type = other DNA
agaatttaaaattataaatg

SEQ ID NO: 73968 - DNA, 20 bp, synthetic construct
  misc_feature 1..20: note = Description of Artificial Sequence: Synthetic oligonucleotide
  misc_feature 1..20: note = Target: SCN10A; (+) strand; PAM type: YTN; PAM sequence: TTT
  source 1..20: mol_type = other DNA
aaaattataaatggaaatta

SEQ ID NO: 73969 - DNA, 20 bp, synthetic construct
  misc_feature 1..20: note = Description of Artificial Sequence: Synthetic oligonucleotide
  misc_feature 1..20: note = Target: SCN10A; (+) strand; PAM type: YTN; PAM sequence: TTA
  source 1..20: mol_type = other DNA
aaattataaatggaaattaa

SEQ ID NO: 73970 - DNA, 20 bp, synthetic construct
  misc_feature 1..20: note = Description of Artificial Sequence: Synthetic oligonucleotide
  misc_feature 1..20: note = Target: SCN10A; (+) strand; PAM type: YTN; PAM sequence: TTA
  source 1..20: mol_type = other DNA
taaatggaaattaaacttta

SEQ ID NO: 73971 - DNA, 20 bp, synthetic construct
  misc_feature 1..20: note = Description of Artificial Sequence: Synthetic oligonucleotide
  misc_feature 1..20: note = Target: SCN10A; (+) strand; PAM type: YTN; PAM sequence: TTA
  source 1..20: mol_type = other DNA
aactttatcaaatgatttta

SEQ ID NO: 73972 - DNA, 20 bp, synthetic construct
  misc_feature 1..20: note = Description of Artificial Sequence: Synthetic oligonucleotide
  misc_feature 1..20: note = Target: SCN10A; (+) strand; PAM type: YTN; PAM sequence: CTT
  source 1..20: mol_type = other DNA
tatcaaatgattttagcatc

SEQ ID NO: 73973 - DNA, 20 bp, synthetic construct
  misc_feature 1..20: note = Description of Artificial Sequence: Synthetic oligonucleotide
  misc_feature 1..20: note = Target: SCN10A; (+) strand; PAM type: YTN; PAM sequence: TTT
  source 1..20: mol_type = other DNA
atcaaatgattttagcatca

SEQ ID NO: 73974 - DNA, 20 bp, synthetic construct
  misc_feature 1..20: note = Description of Artificial Sequence: Synthetic oligonucleotide
  misc_feature 1..20: note = Target: SCN10A; (+) strand; PAM type: YTN; PAM sequence: TTA
  source 1..20: mol_type = other DNA
tcaaatgattttagcatcaa

SEQ ID NO: 73975 - DNA, 20 bp, synthetic construct
  misc_feature 1..20: note = Description of Artificial Sequence: Synthetic oligonucleotide
  misc_feature 1..20: note = Target: SCN10A; (+) strand; PAM type: YTN; PAM sequence: TTT
  source 1..20: mol_type = other DNA
tagcatcaattaagaagact

SEQ ID NO: 73976 - DNA, 20 bp, synthetic construct
  misc_feature 1..20: note = Description of Artificial Sequence: Synthetic oligonucleotide
  misc_feature 1..20: note = Target: SCN10A; (+) strand; PAM type: YTN; PAM sequence: TTT
  source 1..20: mol_type = other DNA
agcatcaattaagaagacta

SEQ ID NO: 73977 - DNA, 20 bp, synthetic construct
  misc_feature 1..20: note = Description of Artificial Sequence: Synthetic oligonucleotide
  misc_feature 1..20: note = Target: SCN10A; (+) strand; PAM type: YTN; PAM sequence: TTA
  source 1..20: mol_type = other DNA
gcatcaattaagaagactat

SEQ ID NO: 73978 - DNA, 20 bp, synthetic construct
  misc_feature 1..20: note = Description of Artificial Sequence: Synthetic oligonucleotide
  misc_feature 1..20: note = Target: SCN10A; (+) strand; PAM type: YTN; PAM sequence: TTA
  source 1..20: mol_type = other DNA
agaagactatgtgatccttt

SEQ ID NO: 73979 - DNA, 20 bp, synthetic construct
  misc_feature 1..20: note = Description of Artificial Sequence: Synthetic oligonucleotide
  misc_feature 1..20: note = Target: SCN10A; (+) strand; PAM type: YTN; PAM sequence: CTA
  source 1..20: mol_type = other DNA
tgtgatccttttcctttaat

SEQ ID NO: 73980 - DNA, 20 bp, synthetic construct
  misc_feature 1..20: note = Description of Artificial Sequence: Synthetic oligonucleotide
  misc_feature 1..20: note = Target: SCN10A; (+) strand; PAM type: YTN; PAM sequence: CTT
  source 1..20: mol_type = other DNA
ttcctttaatctattaataa

SEQ ID NO: 73981 - DNA, 20 bp, synthetic construct
  misc_feature 1..20: note = Description of Artificial Sequence: Synthetic oligonucleotide
  misc_feature 1..20: note = Target: SCN10A; (+) strand; PAM type: YTN; PAM sequence: TTT
  source 1..20: mol_type = other DNA
tcctttaatctattaataaa

SEQ ID NO: 73982 - DNA, 20 bp, synthetic construct
  misc_feature 1..20: note = Description of Artificial Sequence: Synthetic oligonucleotide
  misc_feature 1..20: note = Target: SCN10A; (+) strand; PAM type: YTN; PAM sequence: TTT
  source 1..20: mol_type = other DNA
cctttaatctattaataaaa

SEQ ID NO: 73983 - DNA, 20 bp, synthetic construct
  misc_feature 1..20: note = Description of Artificial Sequence: Synthetic oligonucleotide
  misc_feature 1..20: note = Target: SCN10A; (+) strand; PAM type: YTN; PAM sequence: TTC
  source 1..20: mol_type = other DNA
ctttaatctattaataaaaa

SEQ ID NO: 73984 - DNA, 20 bp, synthetic construct
  misc_feature 1..20: note = Description of Artificial Sequence: Synthetic oligonucleotide
  misc_feature 1..20: note = Target: SCN10A; (+) strand; PAM type: YTN; PAM sequence: CTT
  source 1..20: mol_type = other DNA
taatctattaataaaaatat

SEQ ID NO: 73985 - DNA, 20 bp, synthetic construct
  misc_feature 1..20: note = Description of Artificial Sequence: Synthetic oligonucleotide
  misc_feature 1..20: note = Target: SCN10A; (+) strand; PAM type: YTN; PAM sequence: TTT
  source 1..20: mol_type = other DNA
aatctattaataaaaatata

SEQ ID NO: 73986 - DNA, 20 bp, synthetic construct
  misc_feature 1..20: note = Description of Artificial Sequence: Synthetic oligonucleotide
  misc_feature 1..20: note = Target: SCN10A; (+) strand; PAM type: YTN; PAM sequence: TTA
  source 1..20: mol_type = other DNA
atctattaataaaaatataa

SEQ ID NO: 73987 - DNA, 20 bp, synthetic construct
  misc_feature 1..20: note = Description of Artificial Sequence: Synthetic oligonucleotide
  misc_feature 1..20: note = Target: SCN10A; (+) strand; PAM type: YTN; PAM sequence: CTA
  source 1..20: mol_type = other DNA
ttaataaaaatataacgtat

SEQ ID NO: 73988 - DNA, 20 bp, synthetic construct
  misc_feature 1..20: note = Description of Artificial Sequence: Synthetic oligonucleotide
  misc_feature 1..20: note = Target: SCN10A; (+) strand; PAM type: YTN; PAM sequence: TTA
  source 1..20: mol_type = other DNA
ataaaaatataacgtatttt

SEQ ID NO: 73989 - DNA, 20 bp, synthetic construct
  misc_feature 1..20: note = Description of Artificial Sequence: Synthetic oligonucleotide
  misc_feature 1..20: note = Target: SCN10A; (+) strand; PAM type: YTN; PAM sequence: TTT
  source 1..20: mol_type = other DNA
tctgttgtggcatgcattac

SEQ ID NO: 73990 - DNA, 20 bp, synthetic construct
  misc_feature 1..20: note = Description of Artificial Sequence: Synthetic oligonucleotide
  misc_feature 1..20: note = Target: SCN10A; (+) strand; PAM type: YTN; PAM sequence: TTT
  source 1..20: mol_type = other DNA
ctgttgtggcatgcattact

SEQ ID NO: 73991 - DNA, 20 bp, synthetic construct
  misc_feature 1..20: note = Description of Artificial Sequence: Synthetic oligonucleotide
  misc_feature 1..20: note = Target: SCN10A; (+) strand; PAM type: YTN; PAM sequence: TTC
  source 1..20: mol_type = other DNA
tgttgtggcatgcattactg

SEQ ID NO: 73992 - DNA, 20 bp, synthetic construct
  misc_feature 1..20: note = Description of Artificial Sequence: Synthetic oligonucleotide
  misc_feature 1..20: note = Target: SCN10A; (+) strand; PAM type: YTN; PAM sequence: CTG
  source 1..20: mol_type = other DNA
ttgtggcatgcattactgtt

SEQ ID NO: 73993 - DNA, 20 bp, synthetic construct
  misc_feature 1..20: note = Description of Artificial Sequence: Synthetic oligonucleotide
  misc_feature 1..20: note = Target: SCN10A; (+) strand; PAM type: YTN; PAM sequence: TTG
  source 1..20: mol_type = other DNA
tggcatgcattactgttatg

SEQ ID NO: 73994 - DNA, 20 bp, synthetic construct
  misc_feature 1..20: note = Description of Artificial Sequence: Synthetic oligonucleotide
  misc_feature 1..20: note = Target: SCN10A; (+) strand; PAM type: YTN; PAM sequence: TTA
  source 1..20: mol_type = other DNA
ctgttatgattagcaaaaaa

SEQ ID NO: 73995 - DNA, 20 bp, synthetic construct
  misc_feature 1..20: note = Description of Artificial Sequence: Synthetic oligonucleotide
  misc_feature 1..20: note = Target: SCN10A; (+) strand; PAM type: YTN; PAM sequence: CTG
  source 1..20: mol_type = other DNA
ttatgattagcaaaaaaaaa

SEQ ID NO: 73996 - DNA, 20 bp, synthetic construct
  misc_feature 1..20: note = Description of Artificial Sequence: Synthetic oligonucleotide
  misc_feature 1..20: note = Target: SCN10A; (+) strand; PAM type: YTN; PAM sequence: TTA
  source 1..20: mol_type = other DNA
tgattagcaaaaaaaaaaaa

SEQ ID NO: 73997 - DNA, 20 bp, synthetic construct
  misc_feature 1..20: note = Description of Artificial Sequence: Synthetic oligonucleotide
  misc_feature 1..20: note = Target: SCN10A; (+) strand; PAM type: YTN; PAM sequence: TTA
  source 1..20: mol_type = other DNA
gcaaaaaaaaaaaaaaaaaa

SEQ ID NO: 73998 - DNA, 20 bp, synthetic construct
  misc_feature 1..20: note = Description of Artificial Sequence: Synthetic oligonucleotide
  misc_feature 1..20: note = Target: SCN10A; (+) strand; PAM type: YTN; PAM sequence: CTC
  source 1..20: mol_type = other DNA
tgcaaagcacctgttattat

SEQ ID NO: 73999 - DNA, 20 bp, synthetic construct
  misc_feature 1..20: note = Description of Artificial Sequence: Synthetic oligonucleotide
  misc_feature 1..20: note = Target: SCN10A; (+) strand; PAM type: YTN; PAM sequence: CTG
  source 1..20: mol_type = other DNA
caaagcacctgttattataa

SEQ ID NO: 74000 - DNA, 20 bp, synthetic construct
  misc_feature 1..20: note = Description of Artificial Sequence: Synthetic oligonucleotide
  misc_feature 1..20: note = Target: SCN10A; (+) strand; PAM type: YTN; PAM sequence: CTG
  source 1..20: mol_type = other DNA
ttattataaccaaaggtatg

SEQ ID NO: 74001 - DNA, 20 bp, synthetic construct
  misc_feature 1..20: note = Description of Artificial Sequence: Synthetic oligonucleotide
  misc_feature 1..20: note = Target: SCN10A; (+) strand; PAM type: YTN; PAM sequence: TTA
  source 1..20: mol_type = other DNA
ttataaccaaaggtatgtta

SEQ ID NO: 74002 - DNA, 20 bp, synthetic construct
  misc_feature 1..20: note = Description of Artificial Sequence: Synthetic oligonucleotide
  misc_feature 1..20: note = Target: SCN10A; (+) strand; PAM type: YTN; PAM sequence: TTA
  source 1..20: mol_type = other DNA
taaccaaaggtatgttaggt

SEQ ID NO: 74003 - DNA, 20 bp, synthetic construct
  misc_feature 1..20: note = Description of Artificial Sequence: Synthetic oligonucleotide
  misc_feature 1..20: note = Target: SCN10A; (+) strand; PAM type: YTN; PAM sequence: TTA
  source 1..20: mol_type = other DNA
ggttcaagctggagtggaag

SEQ ID NO: 74004 - DNA, 20 bp, synthetic construct
  misc_feature 1..20: note = Description of Artificial Sequence: Synthetic oligonucleotide
  misc_feature 1..20: note = Target: SCN10A; (+) strand; PAM type: YTN; PAM sequence: TTC
  source 1..20: mol_type = other DNA
aagctggagtggaagcatcc

SEQ ID NO: 74005 - DNA, 20 bp, synthetic construct
  misc_feature 1..20: note = Description of Artificial Sequence: Synthetic oligonucleotide
  misc_feature 1..20: note = Target: SCN10A; (+) strand; PAM type: YTN; PAM sequence: CTG
  source 1..20: mol_type = other DNA
gagtggaagcatccctccca

SEQ ID NO: 74006 - DNA, 20 bp, synthetic construct
  misc_feature 1..20: note = Description of Artificial Sequence: Synthetic oligonucleotide
  misc_feature 1..20: note = Target: SCN10A; (+) strand; PAM type: YTN; PAM sequence: CTC
  source 1..20: mol_type = other DNA
ccagatgtgtggatatggaa

SEQ ID NO: 74007 - DNA, 20 bp, synthetic construct
  misc_feature 1..20: note = Description of Artificial Sequence: Synthetic oligonucleotide
  misc_feature 1..20: note = Target: SCN10A; (+) strand; PAM type: YTN; PAM sequence: TTT
  source 1..20: mol_type = other DNA
ttggaaaactcccagattct

SEQ ID NO: 74008 - DNA, 20 bp, synthetic construct
  misc_feature 1..20: note = Description of Artificial Sequence: Synthetic oligonucleotide
  misc_feature 1..20: note = Target: SCN10A; (+) strand; PAM type: YTN; PAM sequence: TTT
  source 1..20: mol_type = other DNA
tggaaaactcccagattctg

SEQ ID NO: 74009 - DNA, 20 bp, synthetic construct
  misc_feature 1..20: note = Description of Artificial Sequence: Synthetic oligonucleotide
  misc_feature 1..20: note = Target: SCN10A; (+) strand; PAM type: YTN; PAM sequence: TTT
  source 1..20: mol_type = other DNA
ggaaaactcccagattctga

SEQ ID NO: 74010 - DNA, 20 bp, synthetic construct
  misc_feature 1..20: note = Description of Artificial Sequence: Synthetic oligonucleotide
  misc_feature 1..20: note = Target: SCN10A; (+) strand; PAM type: YTN; PAM sequence: TTG
  source 1..20: mol_type = other DNA
gaaaactcccagattctgaa

SEQ ID NO: 74011 - DNA, 20 bp, synthetic construct
  misc_feature 1..20: note = Description of Artificial Sequence: Synthetic oligonucleotide
  misc_feature 1..20: note = Target: SCN10A; (+) strand; PAM type: YTN; PAM sequence: CTC
  source 1..20: mol_type = other DNA
ccagattctgaaactatagg

SEQ ID NO: 74012 - DNA, 20 bp, synthetic construct
  misc_feature 1..20: note = Description of Artificial Sequence: Synthetic oligonucleotide
  misc_feature 1..20: note = Target: SCN10A; (+) strand; PAM type: YTN; PAM sequence: TTC
  source 1..20: mol_type = other DNA
tgaaactataggggtttcac

SEQ ID NO: 74013 - DNA, 20 bp, synthetic construct
  misc_feature 1..20: note = Description of Artificial Sequence: Synthetic oligonucleotide
  misc_feature 1..20: note = Target: SCN10A; (+) strand; PAM type: YTN; PAM sequence: CTG
  source 1..20: mol_type = other DNA
aaactataggggtttcaccc

SEQ ID NO: 74014 - DNA, 20 bp, synthetic construct
  misc_feature 1..20: note = Description of Artificial Sequence: Synthetic oligonucleotide
  misc_feature 1..20: note = Target: SCN10A; (+) strand; PAM type: YTN; PAM sequence: CTA
  source 1..20: mol_type = other DNA
taggggtttcacccactaac

SEQ ID NO: 74015 - DNA, 20 bp, synthetic construct
  misc_feature 1..20: note = Description of Artificial Sequence: Synthetic oligonucleotide
  misc_feature 1..20: note = Target: SCN10A; (+) strand; PAM type: YTN; PAM sequence: TTT
  source 1..20: mol_type = other DNA
cacccactaacctagggaaa

SEQ ID NO: 74016 - DNA, 20 bp, synthetic construct
  misc_feature 1..20: note = Description of Artificial Sequence: Synthetic oligonucleotide
  misc_feature 1..20: note = Target: SCN10A; (+) strand; PAM type: YTN; PAM sequence: TTC
  source 1..20: mol_type = other DNA
acccactaacctagggaaat

SEQ ID NO: 74017 - DNA, 20 bp, synthetic construct
  misc_feature 1..20: note = Description of Artificial Sequence: Synthetic oligonucleotide
  misc_feature 1..20: note = Target: SCN10A; (+) strand; PAM type: YTN; PAM sequence: CTA
  source 1..20: mol_type = other DNA
acctagggaaatagaataac

SEQ ID NO: 74018 - DNA, 20 bp, synthetic construct
  misc_feature 1..20: note = Description of Artificial Sequence: Synthetic oligonucleotide
  misc_feature 1..20: note = Target: SCN10A; (+) strand; PAM type: YTN; PAM sequence: CTA
  source 1..20: mol_type = other DNA
gggaaatagaataacttcag

SEQ ID NO: 74019 - DNA, 20 bp, synthetic construct
  misc_feature 1..20: note = Description of Artificial Sequence: Synthetic oligonucleotide
  misc_feature 1..20: note = Target: SCN10A; (+) strand; PAM type: YTN; PAM sequence: CTT
  source 1..20: mol_type = other DNA
caggaatactaaggttactt

SEQ ID NO: 74020 - DNA, 20 bp, synthetic construct
  misc_feature 1..20: note = Description of Artificial Sequence: Synthetic oligonucleotide
  misc_feature 1..20: note = Target: SCN10A; (+) strand; PAM type: YTN; PAM sequence: TTC
  source 1..20: mol_type = other DNA
aggaatactaaggttacttt

SEQ ID NO: 74021 - DNA, 20 bp, synthetic construct
  misc_feature 1..20: note = Description of Artificial Sequence: Synthetic oligonucleotide
  misc_feature 1..20: note = Target: SCN10A; (+) strand; PAM type: YTN; PAM sequence: CTA
  source 1..20: mol_type = other DNA
aggttactttgaggcatatg

SEQ ID NO: 74022 - DNA, 20 bp, synthetic construct
  misc_feature 1..20: note = Description of Artificial Sequence: Synthetic oligonucleotide
  misc_feature 1..20: note = Target: SCN10A; (+) strand; PAM type: YTN; PAM sequence: TTA
  source 1..20: mol_type = other DNA
ctttgaggcatatgaagcat

SEQ ID NO: 74023 - DNA, 20 bp, synthetic construct
  misc_feature 1..20: note = Description of Artificial Sequence: Synthetic oligonucleotide
  misc_feature 1..20: note = Target: SCN10A; (+) strand; PAM type: YTN; PAM sequence: CTT
  source 1..20: mol_type = other DNA
tgaggcatatgaagcatgat

SEQ ID NO: 74024 - DNA, 20 bp, synthetic construct
  misc_feature 1..20: note = Description of Artificial Sequence: Synthetic oligonucleotide
  misc_feature 1..20: note = Target: SCN10A; (+) strand; PAM type: YTN; PAM sequence: TTT
  source 1..20: mol_type = other DNA
gaggcatatgaagcatgata

SEQ ID NO: 74025 - DNA, 20 bp, synthetic construct
  misc_feature 1..20: note = Description of Artificial Sequence: Synthetic oligonucleotide
  misc_feature 1..20: note = Target: SCN10A; (+) strand; PAM type: YTN; PAM sequence: TTG
  source 1..20: mol_type = other DNA
aggcatatgaagcatgataa

SEQ ID NO: 74026 - DNA, 20 bp, synthetic construct
  misc_feature 1..20: note = Description of Artificial Sequence: Synthetic oligonucleotide
  misc_feature 1..20: note = Target: SCN10A; (+) strand; PAM type: YTN; PAM sequence: CTT
  source 1..20: mol_type = other DNA
aaacagcttcatttatgagt

SEQ ID NO: 74027 - DNA, 20 bp, synthetic construct
  misc_feature 1..20: note = Description of Artificial Sequence: Synthetic oligonucleotide
  misc_feature 1..20: note = Target: SCN10A; (+) strand; PAM type: YTN; PAM sequence: TTA
  source 1..20: mol_type = other DNA
aacagcttcatttatgagtt

SEQ ID NO: 74028 - DNA, 20 bp, synthetic construct
  misc_feature 1..20: note = Description of Artificial Sequence: Synthetic oligonucleotide
  misc_feature 1..20: note = Target: SCN10A; (+) strand; PAM type: YTN; PAM sequence: CTT
  source 1..20: mol_type = other DNA
catttatgagttattttcta

SEQ ID NO: 74029 - DNA, 20 bp, synthetic construct
  misc_feature 1..20: note = Description of Artificial Sequence: Synthetic oligonucleotide
  misc_feature 1..20: note = Target: SCN10A; (+) strand; PAM type: YTN; PAM sequence: TTC
  source 1..20: mol_type = other DNA
atttatgagttattttctaa

SEQ ID NO: 74030 - DNA, 20 bp, synthetic construct
  misc_feature 1..20: note = Description of Artificial Sequence: Synthetic oligonucleotide
  misc_feature 1..20: note = Target: SCN10A; (+) strand; PAM type: YTN; PAM sequence: TTT
  source 1..20: mol_type = other DNA
atgagttattttctaaatat

SEQ ID NO: 74031 - DNA, 20 bp, synthetic construct
  misc_feature 1..20: note = Description of Artificial Sequence: Synthetic oligonucleotide
  misc_feature 1..20: note = Target: SCN10A; (+) strand; PAM type: YTN; PAM sequence: TTA
  source 1..20: mol_type = other DNA
tgagttattttctaaatata

SEQ ID NO: 74032 - DNA, 20 bp, synthetic construct
  misc_feature 1..20: note = Description of Artificial Sequence: Synthetic oligonucleotide
  misc_feature 1..20: note = Target: SCN10A; (+) strand; PAM type: YTN; PAM sequence: TTA
  source 1..20: mol_type = other DNA
ttttctaaatatactccaga

SEQ ID NO: 74033 - DNA, 20 bp, synthetic construct
  misc_feature 1..20: note = Description of Artificial Sequence: Synthetic oligonucleotide
  misc_feature 1..20: note = Target: SCN10A; (+) strand; PAM type: YTN; PAM sequence: TTT
  source 1..20: mol_type = other DNA
tctaaatatactccagagcc

SEQ ID NO: 74034 - DNA, 20 bp, synthetic construct
  misc_feature 1..20: note = Description of Artificial Sequence: Synthetic oligonucleotide
  misc_feature 1..20: note = Target: SCN10A; (+) strand; PAM type: YTN; PAM sequence: TTT
  source 1..20: mol_type = other DNA
ctaaatatactccagagcca

SEQ ID NO: 74035 - DNA, 20 bp, synthetic construct
  misc_feature 1..20: note = Description of Artificial Sequence: Synthetic oligonucleotide
  misc_feature 1..20: note = Target: SCN10A; (+) strand; PAM type: YTN; PAM sequence: TTC
  source 1..20: mol_type = other DNA
taaatatactccagagccat

SEQ ID NO: 74036 - DNA, 20 bp, synthetic construct
  misc_feature 1..20: note = Description of Artificial Sequence: Synthetic oligonucleotide
  misc_feature 1..20: note = Target: SCN10A; (+) strand; PAM type: YTN; PAM sequence: CTA
  source 1..20: mol_type = other DNA
aatatactccagagccattt

SEQ ID NO: 74037 - DNA, 20 bp, synthetic construct
  misc_feature 1..20: note = Description of Artificial Sequence: Synthetic oligonucleotide
  misc_feature 1..20: note = Target: SCN10A; (+) strand; PAM type: YTN; PAM sequence: CTC
  source 1..20: mol_type = other DNA
cagagccatttgttcttagt

SEQ ID NO: 74038 - DNA, 20 bp, synthetic construct
  misc_feature 1..20: note = Description of Artificial Sequence: Synthetic oligonucleotide
  misc_feature 1..20: note = Target: SCN10A; (+) strand; PAM type: YTN; PAM sequence: TTT
  source 1..20: mol_type = other DNA
gttcttagttctgtctcagt

SEQ ID NO: 74039 - DNA, 20 bp, synthetic construct
  misc_feature 1..20: note = Description of Artificial Sequence: Synthetic oligonucleotide
  misc_feature 1..20: note = Target: SCN10A; (+) strand; PAM type: YTN; PAM sequence: TTG
  source 1..20: mol_type = other DNA
ttcttagttctgtctcagtt

SEQ ID NO: 74040 - DNA, 20 bp, synthetic construct
  misc_feature 1..20: note = Description of Artificial Sequence: Synthetic oligonucleotide
  misc_feature 1..20: note = Target: SCN10A; (+) strand; PAM type: YTN; PAM sequence: TTC
  source 1..20: mol_type = other DNA
ttagttctgtctcagttttg

SEQ ID NO: 74041 - DNA, 20 bp, synthetic construct
  misc_feature 1..20: note = Description of Artificial Sequence: Synthetic oligonucleotide
  misc_feature 1..20: note = Target: SCN10A; (+) strand; PAM type: YTN; PAM sequence: CTT
  source 1..20: mol_type = other DNA
agttctgtctcagttttgct

SEQ ID NO: 74042 - DNA, 20 bp, synthetic construct
  misc_feature 1..20: note = Description of Artificial Sequence: Synthetic oligonucleotide
  misc_feature 1..20: note = Target: SCN10A; (+) strand; PAM type: YTN; PAM sequence: TTA
  source 1..20: mol_type = other DNA
gttctgtctcagttttgctc

SEQ ID NO: 74043 - DNA, 20 bp, synthetic construct
  misc_feature 1..20: note = Description of Artificial Sequence: Synthetic oligonucleotide
  misc_feature 1..20: note = Target: SCN10A; (+) strand; PAM type: YTN; PAM sequence: TTC
  source 1..20: mol_type = other DNA
tgtctcagttttgctcctgt

SEQ ID NO: 74044 - DNA, 20 bp, synthetic construct
  misc_feature 1..20: note = Description of Artificial Sequence: Synthetic oligonucleotide
  misc_feature 1..20: note = Target: SCN10A; (+) strand; PAM type: YTN; PAM sequence: CTG
  source 1..20: mol_type = other DNA
tctcagttttgctcctgtct

SEQ ID NO: 74045 - DNA, 20 bp, synthetic construct
  misc_feature 1..20: note = Description of Artificial Sequence: Synthetic oligonucleotide
  misc_feature 1..20: note = Target: SCN10A; (+) strand; PAM type: YTN; PAM sequence: CTC
  source 1..20: mol_type = other DNA
agttttgctcctgtctctct

SEQ ID NO: 74046 - DNA, 20 bp, synthetic construct
  misc_feature 1..20: note = Description of Artificial Sequence: Synthetic oligonucleotide
  misc_feature 1..20: note = Target: SCN10A; (+) strand; PAM type: YTN; PAM sequence: TTT
  source 1..20: mol_type = other DNA
tgctcctgtctctctttcat

SEQ ID NO: 74047 - DNA, 20 bp, synthetic construct
  misc_feature 1..20: note = Description of Artificial Sequence: Synthetic oligonucleotide
  misc_feature 1..20: note = Target: SCN10A; (+) strand; PAM type: YTN; PAM sequence: TTT
  source 1..20: mol_type = other DNA
gctcctgtctctctttcata

SEQ ID NO: 74048 - DNA, 20 bp, synthetic construct
  misc_feature 1..20: note = Description of Artificial Sequence: Synthetic oligonucleotide
  misc_feature 1..20: note = Target: SCN10A; (+) strand; PAM type: YTN; PAM sequence: TTG
  source 1..20: mol_type = other DNA
ctcctgtctctctttcatag

SEQ ID NO: 74049 - DNA, 20 bp, synthetic construct
  misc_feature 1..20: note = Description of Artificial Sequence: Synthetic oligonucleotide
  misc_feature 1..20: note = Target: SCN10A; (+) strand; PAM type: YTN; PAM sequence: CTC
  source 1..20: mol_type = other DNA
ctgtctctctttcatagcag

SEQ ID NO: 74050 - DNA, 20 bp, synthetic construct
  misc_feature 1..20: note = Description of Artificial Sequence: Synthetic oligonucleotide
  misc_feature 1..20: note = Target: SCN10A; (+) strand; PAM type: YTN; PAM sequence: CTG
  source 1..20: mol_type = other DNA
tctctctttcatagcaggcc

SEQ ID NO: 74051 - DNA, 20 bp, synthetic construct
  misc_feature 1..20: note = Description of Artificial Sequence: Synthetic oligonucleotide
  misc_feature 1..20: note = Target: SCN10A; (+) strand; PAM type: YTN; PAM sequence: CTC
  source 1..20: mol_type = other DNA
tctttcatagcaggccttct

SEQ ID NO: 74052 - DNA, 20 bp, synthetic construct
  misc_feature 1..20: note = Description of Artificial Sequence: Synthetic oligonucleotide
  misc_feature 1..20: note = Target: SCN10A; (+) strand; PAM type: YTN; PAM sequence: CTC
  source 1..20: mol_type = other DNA
tttcatagcaggccttctca

SEQ ID NO: 74053 - DNA, 20 bp, synthetic construct
  misc_feature 1..20: note = Description of Artificial Sequence: Synthetic oligonucleotide
  misc_feature 1..20: note = Target: SCN10A; (+) strand; PAM type: YTN; PAM sequence: CTT
  source 1..20: mol_type = other DNA
tcatagcaggccttctcaaa

SEQ ID NO: 74054 - DNA, 20 bp, synthetic construct
  misc_feature 1..20: note = Description of Artificial Sequence: Synthetic oligonucleotide
  misc_feature 1..20: note = Target: SCN10A; (+) strand; PAM type: YTN; PAM sequence: TTT
  source 1..20: mol_type = other DNA
catagcaggccttctcaaaa

SEQ ID NO: 74055 - DNA, 20 bp, synthetic construct
  misc_feature 1..20: note = Description of Artificial Sequence: Synthetic oligonucleotide
  misc_feature 1..20: note = Target: SCN10A; (+) strand; PAM type: YTN; PAM sequence: TTC
  source 1..20: mol_type = other DNA
atagcaggccttctcaaaag

SEQ ID NO: 74056 - DNA, 20 bp, synthetic construct
  misc_feature 1..20: note = Description of Artificial Sequence: Synthetic oligonucleotide
  misc_feature 1..20: note = Target: SCN10A; (+) strand; PAM type: YTN; PAM sequence: CTT
  source 1..20: mol_type = other DNA
ctcaaaagcataccttctct

SEQ ID NO: 74057 - DNA, 20 bp, synthetic construct
  misc_feature 1..20: note = Description of Artificial Sequence: Synthetic oligonucleotide
  misc_feature 1..20: note = Target: SCN10A; (+) strand; PAM type: YTN; PAM sequence: TTC
  source 1..20: mol_type = other DNA
tcaaaagcataccttctcta

SEQ ID NO: 74058 - DNA, 20 bp, synthetic construct
  misc_feature 1..20: note = Description of Artificial Sequence: Synthetic oligonucleotide
  misc_feature 1..20: note = Target: SCN10A; (+) strand; PAM type: YTN; PAM sequence: CTC
  source 1..20: mol_type = other DNA
aaaagcataccttctctaag

SEQ ID NO: 74059 - DNA, 20 bp, synthetic construct
  misc_feature 1..20: note = Description of Artificial Sequence: Synthetic oligonucleotide
  misc_feature 1..20: note = Target: SCN10A; (+) strand; PAM type: YTN; PAM sequence: CTT
  source 1..20: mol_type = other DNA
ctctaaggcatacatttgtg

SEQ ID NO: 74060 - DNA, 20 bp, synthetic construct
  misc_feature 1..20: note = Description of Artificial Sequence: Synthetic oligonucleotide
  misc_feature 1..20: note = Target: SCN10A; (+) strand; PAM type: YTN; PAM sequence: TTC
  source 1..20: mol_type = other DNA
tctaaggcatacatttgtgt

SEQ ID NO: 74061 - DNA, 20 bp, synthetic construct
  misc_feature 1..20: note = Description of Artificial Sequence: Synthetic oligonucleotide
  misc_feature 1..20: note = Target: SCN10A; (+) strand; PAM type: YTN; PAM sequence: CTC
  source 1..20: mol_type = other DNA
taaggcatacatttgtgtgt

SEQ ID NO: 74062 - DNA, 20 bp, synthetic construct
  misc_feature 1..20: note = Description of Artificial Sequence: Synthetic oligonucleotide
  misc_feature 1..20: note = Target: SCN10A; (+) strand; PAM type: YTN; PAM sequence: CTA
  source 1..20: mol_type = other DNA
aggcatacatttgtgtgtgc

SEQ ID NO: 74063 - DNA, 20 bp, synthetic construct
  misc_feature 1..20: note = Description of Artificial Sequence: Synthetic oligonucleotide
  misc_feature 1..20: note = Target: SCN10A; (+) strand; PAM type: YTN; PAM sequence: TTT
  source 1..20: mol_type = other DNA
gtgtgtgcatctagcaggtg

SEQ ID NO: 74064 - DNA, 20 bp, synthetic construct
  misc_feature 1..20: note = Description of Artificial Sequence: Synthetic oligonucleotide
  misc_feature 1..20: note = Target: SCN10A; (+) strand; PAM type: YTN; PAM sequence: TTG
  source 1..20: mol_type = other DNA
tgtgtgcatctagcaggtga

SEQ ID NO: 74065 - DNA, 20 bp, synthetic construct
  misc_feature 1..20: note = Description of Artificial Sequence: Synthetic oligonucleotide
  misc_feature 1..20: note = Target: SCN10A; (+) strand; PAM type: YTN; PAM sequence: CTA
  source 1..20: mol_type = other DNA
gcaggtgagtgagtgtgtgt

SEQ ID NO: 74066 - DNA, 20 bp, synthetic construct
  misc_feature 1..20: note = Description of Artificial Sequence: Synthetic oligonucleotide
  misc_feature 1..20: note = Target: SCN10A; (+) strand; PAM type: YTN; PAM sequence: TTG
  source 1..20: mol_type = other DNA
ggggggggtgggggcgagga

SEQ ID NO: 74067 - DNA, 20 bp, synthetic construct
  misc_feature 1..20: note = Description of Artificial Sequence: Synthetic oligonucleotide
  misc_feature 1..20: note = Target: SCN10A; (+) strand; PAM type: YTN; PAM sequence: CTC
  source 1..20: mol_type = other DNA
atcttcccaggccaccttag

SEQ ID NO: 74068 - DNA, 20 bp, synthetic construct
  misc_feature 1..20: note = Description of Artificial Sequence: Synthetic oligonucleotide
  misc_feature 1..20: note = Target: SCN10A; (+) strand; PAM type: YTN; PAM sequence: CTT
  source 1..20: mol_type = other DNA
cccaggccaccttagacttt

SEQ ID NO: 74069 - DNA, 20 bp, synthetic construct
  misc_feature 1..20: note = Description of Artificial Sequence: Synthetic oligonucleotide
  misc_feature 1..20: note = Target: SCN10A; (+) strand; PAM type: YTN; PAM sequence: TTC
  source 1..20: mol_type = other DNA
ccaggccaccttagactttc

SEQ ID NO: 74070 - DNA, 20 bp, synthetic construct
  misc_feature 1..20: note = Description of Artificial Sequence: Synthetic oligonucleotide
  misc_feature 1..20: note = Target: SCN10A; (+) strand; PAM type: YTN; PAM sequence: CTT
  source 1..20: mol_type = other DNA
agactttctggggctgggac

SEQ ID NO: 74071 - DNA, 20 bp, synthetic construct
  misc_feature 1..20: note = Description of Artificial Sequence: Synthetic oligonucleotide
  misc_feature 1..20: note = Target: SCN10A; (+) strand; PAM type: YTN; PAM sequence: TTA
  source 1..20: mol_type = other DNA
gactttctggggctgggact

SEQ ID NO: 74072 - DNA, 20 bp, synthetic construct
  misc_feature 1..20: note = Description of Artificial Sequence: Synthetic oligonucleotide
  misc_feature 1..20: note = Target: SCN10A; (+) strand; PAM type: YTN; PAM sequence: CTT
  source 1..20: mol_type = other DNA
tctggggctgggactcaggc

SEQ ID NO: 74073 - DNA, 20 bp, synthetic construct
  misc_feature 1..20: note = Description of Artificial Sequence: Synthetic oligonucleotide
  misc_feature 1..20: note = Target: SCN10A; (+) strand; PAM type: YTN; PAM sequence: TTT
  source 1..20: mol_type = other DNA
ctggggctgggactcaggca

SEQ ID NO: 74074 - DNA, 20 bp, synthetic construct
  misc_feature 1..20: note = Description of Artificial Sequence: Synthetic oligonucleotide
  misc_feature 1..20: note = Target: SCN10A; (+) strand; PAM type: YTN; PAM sequence: TTC
  source 1..20: mol_type = other DNA
tggggctgggactcaggcat

SEQ ID NO: 74075 - DNA, 20 bp, synthetic construct
  misc_feature 1..20: note = Description of Artificial Sequence: Synthetic oligonucleotide
  misc_feature 1..20: note = Target: SCN10A; (+) strand; PAM type: YTN; PAM sequence: CTG
  source 1..20: mol_type = other DNA
gggctgggactcaggcattt

SEQ ID NO: 74076 - DNA, 20 bp, synthetic construct
  misc_feature 1..20: note = Description of Artificial Sequence: Synthetic oligonucleotide
  misc_feature 1..20: note = Target: SCN10A; (+) strand; PAM type: YTN; PAM sequence: CTG
  source 1..20: mol_type = other DNA
ggactcaggcatttaaaaaa

SEQ ID NO: 74077 - DNA, 20 bp, synthetic construct
  misc_feature 1..20: note = Description of Artificial Sequence: Synthetic oligonucleotide
  misc_feature 1..20: note = Target: SCN10A; (+) strand; PAM type: YTN; PAM sequence: CTC
  source 1..20: mol_type = other DNA
aggcatttaaaaaatctccc

SEQ ID NO: 74078 - DNA, 20 bp, synthetic construct
  misc_feature 1..20: note = Description of Artificial Sequence: Synthetic oligonucleotide
  misc_feature 1..20: note = Target: SCN10A; (+) strand; PAM type: YTN; PAM sequence: TTT
  source 1..20: mol_type = other DNA
aaaaaatctccccaaaaatt

SEQ ID NO: 74079 - DNA, 20 bp, synthetic construct
  misc_feature 1..20: note = Description of Artificial Sequence: Synthetic oligonucleotide
  misc_feature 1..20: note = Target: SCN10A; (+) strand; PAM type: YTN; PAM sequence: TTA
  source 1..20: mol_type = other DNA
aaaaatctccccaaaaattg

SEQ ID NO: 74080 - DNA, 20 bp, synthetic construct
  misc_feature 1..20: note = Description of Artificial Sequence: Synthetic oligonucleotide
  misc_feature 1..20: note = Target: SCN10A; (+) strand; PAM type: YTN; PAM sequence: CTC
  source 1..20: mol_type = other DNA
cccaaaaattgcaatatgca

SEQ ID NO: 74081 - DNA, 20 bp, synthetic construct
  misc_feature 1..20: note = Description of Artificial Sequence: Synthetic oligonucleotide
  misc_feature 1..20: note = Target: SCN10A; (+) strand; PAM type: YTN; PAM sequence: TTG
  source 1..20: mol_type = other DNA
caatatgcagccaaagttga

SEQ ID NO: 74082 - DNA, 20 bp, synthetic construct
  misc_feature 1..20: note = Description of Artificial Sequence: Synthetic oligonucleotide
  misc_feature 1..20: note = Target: SCN10A; (+) strand; PAM type: YTN; PAM sequence: TTG
  source 1..20: mol_type = other DNA
agaaccactaatctgtatct

SEQ ID NO: 74083 - DNA, 20 bp, synthetic construct
  misc_feature 1..20: note = Description of Artificial Sequence: Synthetic oligonucleotide
  misc_feature 1..20: note = Target: SCN10A; (+) strand; PAM type: YTN; PAM sequence: CTA
  source 1..20: mol_type = other DNA
atctgtatctctttgaaact

SEQ ID NO: 74084 - DNA, 20 bp, synthetic construct
  misc_feature 1..20: note = Description of Artificial Sequence: Synthetic oligonucleotide
  misc_feature 1..20: note = Target: SCN10A; (+) strand; PAM type: YTN; PAM sequence: CTG
  source 1..20: mol_type = other DNA
tatctctttgaaactgaaaa

SEQ ID NO: 74085 - DNA, 20 bp, synthetic construct
  misc_feature 1..20: note = Description of Artificial Sequence: Synthetic oligonucleotide
  misc_feature 1..20: note = Target: SCN10A; (+) strand; PAM type: YTN; PAM sequence: CTC
  source 1..20: mol_type = other DNA
tttgaaactgaaaatcatgt

SEQ ID NO: 74086 - DNA, 20 bp, synthetic construct
  misc_feature 1..20: note = Description of Artificial Sequence: Synthetic oligonucleotide
  misc_feature 1..20: note = Target: SCN10A; (+) strand; PAM type: YTN; PAM sequence: CTT
  source 1..20: mol_type = other DNA
tgaaactgaaaatcatgtat

SEQ ID NO: 74087 - DNA, 20 bp, synthetic construct
  misc_feature 1..20: note = Description of Artificial Sequence: Synthetic oligonucleotide
  misc_feature 1..20: note = Target: SCN10A; (+) strand; PAM type: YTN; PAM sequence: TTT
  source 1..20: mol_type = other DNA
gaaactgaaaatcatgtatg

SEQ ID NO: 74088 - DNA, 20 bp, synthetic construct
  misc_feature 1..20: note = Description of Artificial Sequence: Synthetic oligonucleotide
  misc_feature 1..20: note = Target: SCN10A; (+) strand; PAM type: YTN; PAM sequence: TTG
  source 1..20: mol_type = other DNA
aaactgaaaatcatgtatgt

SEQ ID NO: 74089 - DNA, 20 bp, synthetic construct
  misc_feature 1..20: note = Description of Artificial Sequence: Synthetic oligonucleotide
  misc_feature 1..20: note = Target: SCN10A; (+) strand; PAM type: YTN; PAM sequence: CTG
  source 1..20: mol_type = other DNA
aaaatcatgtatgtttatga

SEQ ID NO: 74090 - DNA, 20 bp, synthetic construct
  misc_feature 1..20: note = Description of Artificial Sequence: Synthetic oligonucleotide
  misc_feature 1..20: note = Target: SCN10A; (+) strand; PAM type: YTN; PAM sequence: TTT
  source 1..20: mol_type = other DNA
atgaaacaaatctcacagaa

SEQ ID NO: 74091 - DNA, 20 bp, synthetic construct
  misc_feature 1..20: note = Description of Artificial Sequence: Synthetic oligonucleotide
  misc_feature 1..20: note = Target: SCN10A; (+) strand; PAM type: YTN; PAM sequence: TTA
  source 1..20: mol_type = other DNA
tgaaacaaatctcacagaag

SEQ ID NO: 74092 - DNA, 20 bp, synthetic construct
  misc_feature 1..20: note = Description of Artificial Sequence: Synthetic oligonucleotide
  misc_feature 1..20: note = Target: SCN10A; (+) strand; PAM type: YTN; PAM sequence: CTC
  source 1..20: mol_type = other DNA
acagaaggagagacctggtt

SEQ ID NO: 74093 - DNA, 20 bp, synthetic construct
  misc_feature 1..20: note = Description of Artificial Sequence: Synthetic oligonucleotide
  misc_feature 1..20: note = Target: SCN10A; (+) strand; PAM type: YTN; PAM sequence: CTG
  source 1..20: mol_type = other DNA
gttattacaaagacatatag

SEQ ID NO: 74094 - DNA, 20 bp, synthetic construct
  misc_feature 1..20: note = Description of Artificial Sequence: Synthetic oligonucleotide
  misc_feature 1..20: note = Target: SCN10A; (+) strand; PAM type: YTN; PAM sequence: TTA
  source 1..20: mol_type = other DNA
ttacaaagacatatagacaa

SEQ ID NO: 74095 - DNA, 20 bp, synthetic construct
  misc_feature 1..20: note = Description of Artificial Sequence: Synthetic oligonucleotide
  misc_feature 1..20: note = Target: SCN10A; (+) strand; PAM type: YTN; PAM sequence: TTA
  source 1..20: mol_type = other DNA
caaagacatatagacaatga

SEQ ID NO: 74096 - DNA, 20 bp, synthetic construct
  misc_feature 1..20: note = Description of Artificial Sequence: Synthetic oligonucleotide
  misc_feature 1..20: note = Target: SCN10A; (+) strand; PAM type: YTN; PAM sequence: TTC
  source 1..20: mol_type = other DNA
agcattacccacatgaggca

SEQ ID NO: 74097 - DNA, 20 bp, synthetic construct
  misc_feature 1..20: note = Description of Artificial Sequence: Synthetic oligonucleotide
  misc_feature 1..20: note = Target: SCN10A; (+) strand; PAM type: YTN; PAM sequence: TTA
  source 1..20: mol_type = other DNA
cccacatgaggcatggcagg

SEQ ID NO: 74098 - DNA, 20 bp, synthetic construct
  misc_feature 1..20: note = Description of Artificial Sequence: Synthetic oligonucleotide
  misc_feature 1..20: note = Target: SCN10A; (+) strand; PAM type: YTN; PAM sequence: CTG
  source 1..20: mol_type = other DNA
ccaagtgaaggaagaaaaga

SEQ ID NO: 74099 - DNA, 20 bp, synthetic construct
  misc_feature 1..20: note = Description of Artificial Sequence: Synthetic oligonucleotide
  misc_feature 1..20: note = Target: SCN10A; (+) strand; PAM type: YTN; PAM sequence: CTA
  source 1..20: mol_type = other DNA
ctcactcaattttctctgga

SEQ ID NO: 74100 - DNA, 20 bp, synthetic construct
  misc_feature 1..20: note = Description of Artificial Sequence: Synthetic oligonucleotide
  misc_feature 1..20: note = Target: SCN10A; (+) strand; PAM type: YTN; PAM sequence: CTC
  source 1..20: mol_type = other DNA
actcaattttctctggaagg

SEQ ID NO: 74101 - DNA, 20 bp, synthetic construct
  misc_feature 1..20: note = Description of Artificial Sequence: Synthetic oligonucleotide
  misc_feature 1..20: note = Target: SCN10A; (+) strand; PAM type: YTN; PAM sequence: CTC
  source 1..20: mol_type = other DNA
aattttctctggaaggtcag

SEQ ID NO: 74102 - DNA, 20 bp, synthetic construct
  misc_feature 1..20: note = Description of Artificial Sequence: Synthetic oligonucleotide
  misc_feature 1..20: note = Target: SCN10A; (+) strand; PAM type: YTN; PAM sequence: TTT
  source 1..20: mol_type = other DNA
tctctggaaggtcagttcgg

SEQ ID NO: 74103 - DNA, 20 bp, synthetic construct
  misc_feature 1..20: note = Description of Artificial Sequence: Synthetic oligonucleotide
  misc_feature 1..20: note = Target: SCN10A; (+) strand; PAM type: YTN; PAM sequence: TTT
  source 1..20: mol_type = other DNA
ctctggaaggtcagttcggg

SEQ ID NO: 74104 - DNA, 20 bp, synthetic construct
  misc_feature 1..20: note = Description of Artificial Sequence: Synthetic oligonucleotide
  misc_feature 1..20: note = Target: SCN10A; (+) strand; PAM type: YTN; PAM sequence: TTC
  source 1..20: mol_type = other DNA
tctggaaggtcagttcgggt

SEQ ID NO: 74105 - DNA, 20 bp, synthetic construct
  misc_feature 1..20: note = Description of Artificial Sequence: Synthetic oligonucleotide
  misc_feature 1..20: note = Target: SCN10A; (+) strand; PAM type: YTN; PAM sequence: CTC
  source 1..20: mol_type = other DNA
tggaaggtcagttcgggtca

SEQ ID NO: 74106 - DNA, 20 bp, synthetic construct
  misc_feature 1..20: note = Description of Artificial Sequence: Synthetic oligonucleotide
  misc_feature 1..20: note = Target: SCN10A; (+) strand; PAM type: YTN; PAM sequence: CTG
  source 1..20: mol_type = other DNA
gaaggtcagttcgggtcatg

SEQ ID NO: 74107 - DNA, 20 bp, synthetic construct
  misc_feature 1..20: note = Description of Artificial Sequence: Synthetic oligonucleotide
  misc_feature 1..20: note = Target: SCN10A; (+) strand; PAM type: YTN; PAM sequence: TTC
  source 1..20: mol_type = other DNA
gggtcatgcacacacaatta

SEQ ID NO: 74108 - DNA, 20 bp, synthetic construct
  misc_feature 1..20: note = Description of Artificial Sequence: Synthetic oligonucleotide
  misc_feature 1..20: note = Target: SCN10A; (+) strand; PAM type: YTN; PAM sequence: TTA
  source 1..20: mol_type = other DNA
accaaaatagtgaccgtaat

SEQ ID NO: 74109 - DNA, 20 bp, synthetic construct
  misc_feature 1..20: note = Description of Artificial Sequence: Synthetic oligonucleotide
  misc_feature 1..20: note = Target: SCN10A; (+) strand; PAM type: YTN; PAM sequence: CTG
  source 1..20: mol_type = other DNA
aaccacctgaaaggcctgtg

SEQ ID NO: 74110 - DNA, 20 bp, synthetic construct
  misc_feature 1..20: note = Description of Artificial Sequence: Synthetic oligonucleotide
  misc_feature 1..20: note = Target: SCN10A; (+) strand; PAM type: YTN; PAM sequence: CTG
  source 1..20: mol_type = other DNA
aaaggcctgtgttaaggaaa

SEQ ID NO: 74111 - DNA, 20 bp, synthetic construct
  misc_feature 1..20: note = Description of Artificial Sequence: Synthetic oligonucleotide
  misc_feature 1..20: note = Target: SCN10A; (+) strand; PAM type: YTN; PAM sequence: CTG
  source 1..20: mol_type = other DNA
tgttaaggaaaagctgagat

SEQ ID NO: 74112 - DNA, 20 bp, synthetic construct
  misc_feature 1..20: note = Description of Artificial Sequence: Synthetic oligonucleotide
  misc_feature 1..20: note = Target: SCN10A; (+) strand; PAM type: YTN; PAM sequence: TTA
  source 1..20: mol_type = other DNA
aggaaaagctgagatcacca

SEQ ID NO: 74113 - DNA, 20 bp, synthetic construct
  misc_feature 1..20: note = Description of Artificial Sequence: Synthetic oligonucleotide
  misc_feature 1..20: note = Target: SCN10A; (+) strand; PAM type: YTN; PAM sequence: CTG
  source 1..20: mol_type = other DNA
agatcaccaagtctctgtga

SEQ ID NO: 74114 - DNA, 20 bp, synthetic construct
  misc_feature 1..20: note = Description of Artificial Sequence: Synthetic oligonucleotide
  misc_feature 1..20: note = Target: SCN10A; (+) strand; PAM type: YTN; PAM sequence: CTC
  source 1..20: mol_type = other DNA
tgtgatgtcatctaggatca

SEQ ID NO: 74115 - DNA, 20 bp, synthetic construct
  misc_feature 1..20: note = Description of Artificial Sequence: Synthetic oligonucleotide
  misc_feature 1..20: note = Target: SCN10A; (+) strand; PAM type: YTN; PAM sequence: CTG
  source 1..20: mol_type = other DNA
tgatgtcatctaggatcacc

SEQ ID NO: 74116 - DNA, 20 bp, synthetic construct
  misc_feature 1..20: note = Description of Artificial Sequence: Synthetic oligonucleotide
  misc_feature 1..20: note = Target: SCN10A; (+) strand; PAM type: YTN; PAM sequence: CTA
  source 1..20: mol_type = other DNA
ggatcaccttgatgctgaat

SEQ ID NO: 74117 - DNA, 20 bp, synthetic construct
  misc_feature 1..20: note = Description of Artificial Sequence: Synthetic oligonucleotide
  misc_feature 1..20: note = Target: SCN10A; (+) strand; PAM type: YTN; PAM sequence: CTT
  source 1..20: mol_type = other DNA
gatgctgaatgattacattc

SEQ ID NO: 74118 - DNA, 20 bp, synthetic construct
  misc_feature 1..20: note = Description of Artificial Sequence: Synthetic oligonucleotide
  misc_feature 1..20: note = Target: SCN10A; (+) strand; PAM type: YTN; PAM sequence: TTG
  source 1..20: mol_type = other DNA
atgctgaatgattacattca

SEQ ID NO: 74119 - DNA, 20 bp, synthetic construct
  misc_feature 1..20: note = Description of Artificial Sequence: Synthetic oligonucleotide
  misc_feature 1..20: note = Target: SCN10A; (+) strand; PAM type: YTN; PAM sequence: CTG
  source 1..20: mol_type = other DNA
aatgattacattcataaatc

SEQ ID NO: 74120 - DNA, 20 bp, synthetic construct
  misc_feature 1..20: note = Description of Artificial Sequence: Synthetic oligonucleotide
  misc_feature 1..20: note = Target: SCN10A; (+) strand; PAM type: YTN; PAM sequence: TTA
  source 1..20: mol_type = other DNA
cattcataaatcttagccaa

SEQ ID NO: 74121 - DNA, 20 bp, synthetic construct
  misc_feature 1..20: note = Description of Artificial Sequence: Synthetic oligonucleotide
  misc_feature 1..20: note = Target: SCN10A; (+) strand; PAM type: YTN; PAM sequence: TTC
  source 1..20: mol_type = other DNA
ataaatcttagccaatatta

SEQ ID NO: 74122 - DNA, 20 bp, synthetic construct
  misc_feature 1..20: note = Description of Artificial Sequence: Synthetic oligonucleotide
  misc_feature 1..20: note = Target: SCN10A; (+) strand; PAM type: YTN; PAM sequence: CTT
  source 1..20: mol_type = other DNA
agccaatattagctttatga

SEQ ID NO: 74123 - DNA, 20 bp, synthetic construct
  misc_feature 1..20: note = Description of Artificial Sequence: Synthetic oligonucleotide
  misc_feature 1..20: note = Target: SCN10A; (+) strand; PAM type: YTN; PAM sequence: TTA
  source 1..20: mol_type = other DNA
gccaatattagctttatgat

SEQ ID NO: 74124 - DNA, 20 bp, synthetic construct
  misc_feature 1..20: note = Description of Artificial Sequence: Synthetic oligonucleotide
  misc_feature 1..20: note = Target: SCN10A; (+) strand; PAM type: YTN; PAM sequence: TTA
  source 1..20: mol_type = other DNA
gctttatgatcttgtcacat

SEQ ID NO: 74125 - DNA, 20 bp, synthetic construct
  misc_feature 1..20: note = Description of Artificial Sequence: Synthetic oligonucleotide
  misc_feature 1..20: note = Target: SCN10A; (+) strand; PAM type: YTN; PAM sequence: CTT
  source 1..20: mol_type = other DNA
tatgatcttgtcacataata

SEQ ID NO: 74126 - DNA, 20 bp, synthetic construct
  misc_feature 1..20: note = Description of Artificial Sequence: Synthetic oligonucleotide
  misc_feature 1..20: note = Target: SCN10A; (+) strand; PAM type: YTN; PAM sequence: TTT
  source 1..20: mol_type = other DNA
atgatcttgtcacataataa

SEQ ID NO: 74127 - DNA, 20 bp, synthetic construct
  misc_feature 1..20: note = Description of Artificial Sequence: Synthetic oligonucleotide
  misc_feature 1..20: note = Target: SCN10A; (+) strand; PAM type: YTN; PAM sequence: TTA
  source 1..20: mol_type = other DNA
tgatcttgtcacataataac

SEQ ID NO: 74128 - DNA, 20 bp, synthetic construct
  misc_feature 1..20: note = Description of Artificial Sequence: Synthetic oligonucleotide
  misc_feature 1..20: note = Target: SCN10A; (+) strand; PAM type: YTN; PAM sequence: CTT
  source 1..20: mol_type = other DNA
gtcacataataaccactaac

SEQ ID NO: 74129 - DNA, 20 bp, synthetic construct
  misc_feature 1..20: note = Description of Artificial Sequence: Synthetic oligonucleotide
  misc_feature 1..20: note = Target: SCN10A; (+) strand; PAM type: YTN; PAM sequence: TTG
  source 1..20: mol_type = other DNA
tcacataataaccactaaca

SEQ ID NO: 74130 - DNA, 20 bp, synthetic construct
  misc_feature 1..20: note = Description of Artificial Sequence: Synthetic oligonucleotide
  misc_feature 1..20: note = Target: SCN10A; (+) strand; PAM type: YTN; PAM sequence: CTA
  source 1..20: mol_type = other DNA
acatttactgagtgcctaag

SEQ ID NO: 74131 - DNA, 20 bp, synthetic construct
  misc_feature 1..20: note = Description of Artificial Sequence: Synthetic oligonucleotide
  misc_feature 1..20: note = Target: SCN10A; (+) strand; PAM type: YTN; PAM sequence: TTT
  source 1..20: mol_type = other DNA
actgagtgcctaagctaggc

SEQ ID NO: 74132 - DNA, 20 bp, synthetic construct
  misc_feature 1..20: note = Description of Artificial Sequence: Synthetic oligonucleotide
  misc_feature 1..20: note = Target: SCN10A; (+) strand; PAM type: YTN; PAM sequence: TTA
  source 1..20: mol_type = other DNA
ctgagtgcctaagctaggct

SEQ ID NO: 74133 - DNA, 20 bp, synthetic construct
  misc_feature 1..20: note = Description of Artificial Sequence: Synthetic oligonucleotide
  misc_feature 1..20: note = Target: SCN10A; (+) strand; PAM type: YTN; PAM sequence: CTG
  source 1..20: mol_type = other DNA
agtgcctaagctaggctgag

SEQ ID NO: 74134 - DNA, 20 bp, synthetic construct
  misc_feature 1..20: note = Description of Artificial Sequence: Synthetic oligonucleotide
  misc_feature 1..20: note = Target: SCN10A; (+) strand; PAM type: YTN; PAM sequence: CTA
  source 1..20: mol_type = other DNA
agctaggctgagtactttgt

SEQ ID NO: 74135 - DNA, 20 bp, synthetic construct
  misc_feature 1..20: note = Description of Artificial Sequence: Synthetic oligonucleotide
  misc_feature 1..20: note = Target: SCN10A; (+) strand; PAM type: YTN; PAM sequence: CTA
  source 1..20: mol_type = other DNA
ggctgagtactttgtccatg

SEQ ID NO: 74136 - DNA, 20 bp, synthetic construct
  misc_feature 1..20: note = Description of Artificial Sequence: Synthetic oligonucleotide
  misc_feature 1..20: note = Target: SCN10A; (+) strand; PAM type: YTN; PAM sequence: CTG
  source 1..20: mol_type = other DNA
agtactttgtccatgttact

SEQ ID NO: 74137 - DNA, 20 bp, synthetic construct
  misc_feature 1..20: note = Description of Artificial Sequence: Synthetic oligonucleotide
  misc_feature 1..20: note = Target: SCN10A; (+) strand; PAM type: YTN; PAM sequence: CTT
  source 1..20: mol_type = other DNA
tgtccatgttacttctaata

SEQ ID NO: 74138 - DNA, 20 bp, synthetic construct
  misc_feature 1..20: note = Description of Artificial Sequence: Synthetic oligonucleotide
  misc_feature 1..20: note = Target: SCN10A; (+) strand; PAM type: YTN; PAM sequence: TTT
  source 1..20: mol_type = other DNA
gtccatgttacttctaatac

SEQ ID NO: 74139 - DNA, 20 bp, synthetic construct
  misc_feature 1..20: note = Description of Artificial Sequence: Synthetic oligonucleotide
  misc_feature 1..20: note = Target: SCN10A; (+) strand; PAM type: YTN; PAM sequence: TTG
  source 1..20: mol_type = other DNA
tccatgttacttctaataca

SEQ ID NO: 74140 - DNA, 20 bp, synthetic construct
  misc_feature 1..20: note = Description of Artificial Sequence: Synthetic oligonucleotide
  misc_feature 1..20: note = Target: SCN10A; (+) strand; PAM type: YTN; PAM sequence: TTA
  source 1..20: mol_type = other DNA
cttctaatacaactgatcta

SEQ ID NO: 74141 - DNA, 20 bp, synthetic construct
  misc_feature 1..20: note = Description of Artificial Sequence: Synthetic oligonucleotide
  misc_feature 1..20: note = Target: SCN10A; (+) strand; PAM type: YTN; PAM sequence: CTT
  source 1..20: mol_type = other DNA
ctaatacaactgatctacag

SEQ ID NO: 74142 - DNA, 20 bp, synthetic construct
  misc_feature 1..20: note = Description of Artificial Sequence: Synthetic oligonucleotide
  misc_feature 1..20: note = Target: SCN10A; (+) strand; PAM type: YTN; PAM sequence: TTC
  source 1..20: mol_type = other DNA
taatacaactgatctacagg

SEQ ID NO: 74143 - DNA, 20 bp, synthetic construct
  misc_feature 1..20: note = Description of Artificial Sequence: Synthetic oligonucleotide
  misc_feature 1..20: note = Target: SCN10A; (+) strand; PAM type: YTN; PAM sequence: CTA
  source 1..20: mol_type = other DNA
atacaactgatctacaggtg

SEQ ID NO: 74144 - DNA, 20 bp, synthetic construct
  misc_feature 1..20: note = Description of Artificial Sequence: Synthetic oligonucleotide
  misc_feature 1..20: note = Target: SCN10A; (+) strand; PAM type: YTN; PAM sequence: CTG
  source 1..20: mol_type = other DNA
atctacaggtgggtataaat

SEQ ID NO: 74145 - DNA, 20 bp, synthetic construct
  misc_feature 1..20: note = Description of Artificial Sequence: Synthetic oligonucleotide
  misc_feature 1..20: note = Target: SCN10A; (+) strand; PAM type: YTN; PAM sequence: CTA
  source 1..20: mol_type = other DNA
caggtgggtataaatatcta

SEQ ID NO: 74146 - DNA, 20 bp, synthetic construct
  misc_feature 1..20: note = Description of Artificial Sequence: Synthetic oligonucleotide
  misc_feature 1..20: note = Target: SCN10A; (+) strand; PAM type: YTN; PAM sequence: CTA
  source 1..20: mol_type = other DNA
cattttgaagctgagaaaca

SEQ ID NO: 74147 - DNA, 20 bp, synthetic construct
  misc_feature 1..20: note = Description of Artificial Sequence: Synthetic oligonucleotide
  misc_feature 1..20: note = Target: SCN10A; (+) strand; PAM type: YTN; PAM sequence: TTT
  source 1..20: mol_type = other DNA
tgaagctgagaaacaggctg

SEQ ID NO: 74148 - DNA, 20 bp, synthetic construct
  misc_feature 1..20: note = Description of Artificial Sequence: Synthetic oligonucleotide
  misc_feature 1..20: note = Target: SCN10A; (+) strand; PAM type: YTN; PAM sequence: TTT
  source 1..20: mol_type = other DNA
gaagctgagaaacaggctga

SEQ ID NO: 74149 - DNA, 20 bp, synthetic construct
  misc_feature 1..20: note = Description of Artificial Sequence: Synthetic oligonucleotide
  misc_feature 1..20: note = Target: SCN10A; (+) strand; PAM type: YTN; PAM sequence: TTG
  source 1..20: mol_type = other DNA
aagctgagaaacaggctgac

SEQ ID NO: 74150 - DNA, 20 bp, synthetic construct
  misc_feature 1..20: note = Description of Artificial Sequence: Synthetic oligonucleotide
  misc_feature 1..20: note = Target: SCN10A; (+) strand; PAM type: YTN; PAM sequence: CTG
  source 1..20: mol_type = other DNA
agaaacaggctgacaaaaaa

SEQ ID NO: 74151 - DNA, 20 bp, synthetic construct
  misc_feature 1..20: note = Description of Artificial Sequence: Synthetic oligonucleotide
  misc_feature 1..20: note = Target: SCN10A; (+) strand; PAM type: YTN; PAM sequence: CTG
  source 1..20: mol_type = other DNA
acaaaaaataaaagttaaat

SEQ ID NO: 74152 - DNA, 20 bp, synthetic construct
  misc_feature 1..20: note = Description of Artificial Sequence: Synthetic oligonucleotide
  misc_feature 1..20: note = Target: SCN10A; (+) strand; PAM type: YTN; PAM sequence: TTA
  source 1..20: mol_type = other DNA
aataacttttctcaggtcat

SEQ ID NO: 74153 - DNA, 20 bp, synthetic construct
  misc_feature 1..20: note = Description of Artificial Sequence: Synthetic oligonucleotide
  misc_feature 1..20: note = Target: SCN10A; (+) strand; PAM type: YTN; PAM sequence: CTT
  source 1..20: mol_type = other DNA
ttctcaggtcatgcagctag

SEQ ID NO: 74154 - DNA, 20 bp, synthetic construct
  misc_feature 1..20: note = Description of Artificial Sequence: Synthetic oligonucleotide
  misc_feature 1..20: note = Target: SCN10A; (+) strand; PAM type: YTN; PAM sequence: TTT
  source 1..20: mol_type = other DNA
tctcaggtcatgcagctagt

SEQ ID NO: 74155 - DNA, 20 bp, synthetic construct
  misc_feature 1..20: note = Description of Artificial Sequence: Synthetic oligonucleotide
  misc_feature 1..20: note = Target: SCN10A; (+) strand; PAM type: YTN; PAM sequence: TTT
  source 1..20: mol_type = other DNA
ctcaggtcatgcagctagtc

SEQ ID NO: 74156 - DNA, 20 bp, synthetic construct
  misc_feature 1..20: note = Description of Artificial Sequence: Synthetic oligonucleotide
  misc_feature 1..20: note = Target: SCN10A; (+) strand; PAM type: YTN; PAM sequence: TTC
  source 1..20: mol_type = other DNA
tcaggtcatgcagctagtca

SEQ ID NO: 74157 - DNA, 20 bp, synthetic construct
  misc_feature 1..20: note = Description of Artificial Sequence: Synthetic oligonucleotide
  misc_feature 1..20: note = Target: SCN10A; (+) strand; PAM type: YTN; PAM sequence: CTC
  source 1..20: mol_type = other DNA
aggtcatgcagctagtcaac

SEQ ID NO: 74158 - DNA, 20 bp, synthetic construct
  misc_feature 1..20: note = Description of Artificial Sequence: Synthetic oligonucleotide
  misc_feature 1..20: note = Target: SCN10A; (+) strand; PAM type: YTN; PAM sequence: CTA
  source 1..20: mol_type = other DNA
gtcaaccatgctgcagagat

SEQ ID NO: 74159 - DNA, 20 bp, synthetic construct
  misc_feature 1..20: note = Description of Artificial Sequence: Synthetic oligonucleotide
  misc_feature 1..20: note = Target: SCN10A; (+) strand; PAM type: YTN; PAM sequence: CTG
  source 1..20: mol_type = other DNA
cagagatgtgaactcttatc

SEQ ID NO: 74160 - DNA, 20 bp, synthetic construct
  misc_feature 1..20: note = Description of Artificial Sequence: Synthetic oligonucleotide
  misc_feature 1..20: note = Target: SCN10A; (+) strand; PAM type: YTN; PAM sequence: CTC
  source 1..20: mol_type = other DNA
ttatctgtttgataacaaac

SEQ ID NO: 74161 - DNA, 20 bp, synthetic construct
  misc_feature 1..20: note = Description of Artificial Sequence: Synthetic oligonucleotide
  misc_feature 1..20: note = Target: SCN10A; (+) strand; PAM type: YTN; PAM sequence: CTT
  source 1..20: mol_type = other DNA
atctgtttgataacaaactc

SEQ ID NO: 74162 - DNA, 20 bp, synthetic construct
  misc_feature 1..20: note = Description of Artificial Sequence: Synthetic oligonucleotide
  misc_feature 1..20: note = Target: SCN10A; (+) strand; PAM type: YTN; PAM sequence: TTA
  source 1..20: mol_type = other DNA
tctgtttgataacaaactct

SEQ ID NO: 74163 - DNA, 20 bp, synthetic construct
  misc_feature 1..20: note = Description of Artificial Sequence: Synthetic oligonucleotide
  misc_feature 1..20: note = Target: SCN10A; (+) strand; PAM type: YTN; PAM sequence: CTG
  source 1..20: mol_type = other DNA
tttgataacaaactctgagc

SEQ ID NO: 74164 - DNA, 20 bp, synthetic construct
  misc_feature 1..20: note = Description of Artificial Sequence: Synthetic oligonucleotide
  misc_feature 1..20: note = Target: SCN10A; (+) strand; PAM type: YTN; PAM sequence: TTT
  source 1..20: mol_type = other DNA
gataacaaactctgagcaag

SEQ ID NO: 74165 - DNA, 20 bp, synthetic construct
  misc_feature 1..20: note = Description of Artificial Sequence: Synthetic oligonucleotide
  misc_feature 1..20: note = Target: SCN10A; (+) strand; PAM type: YTN; PAM sequence: TTG
  source 1..20: mol_type = other DNA
ataacaaactctgagcaaga

SEQ ID NO: 74166 - DNA, 20 bp, synthetic construct
  misc_feature 1..20: note = Description of Artificial Sequence: Synthetic oligonucleotide
  misc_feature 1..20: note = Target: SCN10A; (+) strand; PAM type: YTN; PAM sequence: CTC
  source 1..20: mol_type = other DNA
tgagcaagatagaaggaaac

SEQ ID NO: 74167 - DNA, 20 bp, synthetic construct
  misc_feature 1..20: note = Description of Artificial Sequence: Synthetic oligonucleotide
  misc_feature 1..20: note = Target: SCN10A; (+) strand; PAM type: YTN; PAM sequence: CTG
  source 1..20: mol_type = other DNA
agcaagatagaaggaaacag

SEQ ID NO: 74168 - DNA, 20 bp, synthetic construct
  misc_feature 1..20: note = Description of Artificial Sequence: Synthetic oligonucleotide
  misc_feature 1..20: note = Target: SCN10A; (+) strand; PAM type: YTN; PAM sequence: CTC
  source 1..20: mol_type = other DNA
ccttttccaaaatgtccttc

SEQ ID NO: 74169 - DNA, 20 bp, synthetic construct
  misc_feature 1..20: note = Description of Artificial Sequence: Synthetic oligonucleotide
  misc_feature 1..20: note = Target: SCN10A; (+) strand; PAM type: YTN; PAM sequence: CTT
  source 1..20: mol_type = other DNA
ttccaaaatgtccttctgcc

SEQ ID NO: 74170 - DNA, 20 bp, synthetic construct
  misc_feature 1..20: note = Description of Artificial Sequence: Synthetic oligonucleotide
  misc_feature 1..20: note = Target: SCN10A; (+) strand; PAM type: YTN; PAM sequence: TTT
  source 1..20: mol_type = other DNA
tccaaaatgtccttctgccc

SEQ ID NO: 74171 - DNA, 20 bp, synthetic construct
  misc_feature 1..20: note = Description of Artificial Sequence: Synthetic oligonucleotide
  misc_feature 1..20: note = Target: SCN10A; (+) strand; PAM type: YTN; PAM sequence: TTT
  source 1..20: mol_type = other DNA
ccaaaatgtccttctgcccc

SEQ ID NO: 74172 - DNA, 20 bp, synthetic construct
  misc_feature 1..20: note = Description of Artificial Sequence: Synthetic oligonucleotide
  misc_feature 1..20: note = Target: SCN10A; (+) strand; PAM type: YTN; PAM sequence: TTC
  source 1..20: mol_type = other DNA
caaaatgtccttctgccccg

SEQ ID NO: 74173 - DNA, 20 bp, synthetic construct
  misc_feature 1..20: note = Description of Artificial Sequence: Synthetic oligonucleotide
  misc_feature 1..20: note = Target: SCN10A; (+) strand; PAM type: YTN; PAM sequence: CTT
  source 1..20: mol_type = other DNA
ctgccccgaagccttcattt

SEQ ID NO: 74174 - DNA, 20 bp, synthetic construct
  misc_feature 1..20: note = Description of Artificial Sequence: Synthetic oligonucleotide
  misc_feature 1..20: note = Target: SCN10A; (+) strand; PAM type: YTN; PAM sequence: TTC
  source 1..20: mol_type = other DNA
tgccccgaagccttcatttc

SEQ ID NO: 74175 - DNA, 20 bp, synthetic construct
  misc_feature 1..20: note = Description of Artificial Sequence: Synthetic oligonucleotide
  misc_feature 1..20: note = Target: SCN10A; (+) strand; PAM type: YTN; PAM sequence: CTG
  source 1..20: mol_type = other DNA
ccccgaagccttcatttcag

SEQ ID NO: 74176 - DNA, 20 bp, synthetic construct
  misc_feature 1..20: note = Description of Artificial Sequence: Synthetic oligonucleotide
  misc_feature 1..20: note = Target: SCN10A; (+) strand; PAM type: YTN; PAM sequence: CTT
  source 1..20: mol_type = other DNA
catttcagtatacaaaatgg

SEQ ID NO: 74177 - DNA, 20 bp, synthetic construct
  misc_feature 1..20: note = Description of Artificial Sequence: Synthetic oligonucleotide
  misc_feature 1..20: note = Target: SCN10A; (+) strand; PAM type: YTN; PAM sequence: TTC
  source 1..20: mol_type = other DNA
atttcagtatacaaaatggc

SEQ ID NO: 74178 - DNA, 20 bp, synthetic construct
  misc_feature 1..20: note = Description of Artificial Sequence: Synthetic oligonucleotide
  misc_feature 1..20: note = Target: SCN10A; (+) strand; PAM type: YTN; PAM sequence: TTT
  source 1..20: mol_type = other DNA
cagtatacaaaatggcctga

SEQ ID NO: 74179 - DNA, 20 bp, synthetic construct
  misc_feature 1..20: note = Description of Artificial Sequence: Synthetic oligonucleotide
  misc_feature 1..20: note = Target: SCN10A; (+) strand; PAM type: YTN; PAM sequence: TTC
  source 1..20: mol_type = other DNA
agtatacaaaatggcctgaa

SEQ ID NO: 74180 - DNA, 20 bp, synthetic construct
  misc_feature 1..20: note = Description of Artificial Sequence: Synthetic oligonucleotide
  misc_feature 1..20: note = Target: SCN10A; (+) strand; PAM type: YTN; PAM sequence: CTG
  source 1..20: mol_type = other DNA
aaatttcatctggcaaatgt

SEQ ID NO: 74181 - DNA, 20 bp, synthetic construct
  misc_feature 1..20: note = Description of Artificial Sequence: Synthetic oligonucleotide
  misc_feature 1..20: note = Target: SCN10A; (+) strand; PAM type: YTN; PAM sequence: TTT
  source 1..20: mol_type = other DNA
catctggcaaatgtcttttt

SEQ ID NO: 74182 - DNA, 20 bp, synthetic construct
  misc_feature 1..20: note = Description of Artificial Sequence: Synthetic oligonucleotide
  misc_feature 1..20: note = Target: SCN10A; (+) strand; PAM type: YTN; PAM sequence: TTC
  source 1..20: mol_type = other DNA
atctggcaaatgtctttttt

SEQ ID NO: 74183 - DNA, 20 bp, synthetic construct
  misc_feature 1..20: note = Description of Artificial Sequence: Synthetic oligonucleotide
  misc_feature 1..20: note = Target: SCN10A; (+) strand; PAM type: YTN; PAM sequence: CTG
  source 1..20: mol_type = other DNA
gcaaatgtcttttttattct

SEQ ID NO: 74184 - DNA, 20 bp, synthetic construct
  misc_feature 1..20: note = Description of Artificial Sequence: Synthetic oligonucleotide
  misc_feature 1..20: note = Target: SCN10A; (+) strand; PAM type: YTN; PAM sequence: CTT
  source 1..20: mol_type = other DNA
ttttattctaaaagacaaag

SEQ ID NO: 74185 - DNA, 20 bp, synthetic construct
  misc_feature 1..20: note = Description of Artificial Sequence: Synthetic oligonucleotide
  misc_feature 1..20: note = Target: SCN10A; (+) strand; PAM type: YTN; PAM sequence: TTT
  source 1..20: mol_type = other DNA
tttattctaaaagacaaaga

SEQ ID NO: 74186 - DNA, 20 bp, synthetic construct
  misc_feature 1..20: note = Description of Artificial Sequence: Synthetic oligonucleotide
  misc_feature 1..20: note = Target: SCN10A; (+) strand; PAM type: YTN; PAM sequence: TTT
  source 1..20: mol_type = other DNA
ttattctaaaagacaaagaa

SEQ ID NO: 74187 - DNA, 20 bp, synthetic construct
  misc_feature 1..20: note = Description of Artificial Sequence: Synthetic oligonucleotide
  misc_feature 1..20: note = Target: SCN10A; (+) strand; PAM type: YTN; PAM sequence: TTT
  source 1..20: mol_type = other DNA
tattctaaaagacaaagaaa

SEQ ID NO: 74188 - DNA, 20 bp, synthetic construct
  misc_feature 1..20: note = Description of Artificial Sequence: Synthetic oligonucleotide
  misc_feature 1..20: note = Target: SCN10A; (+) strand; PAM type: YTN; PAM sequence: TTT
  source 1..20: mol_type = other DNA
attctaaaagacaaagaaaa

SEQ ID NO: 74189 - DNA, 20 bp, synthetic construct
  misc_feature 1..20: note = Description of Artificial Sequence: Synthetic oligonucleotide
  misc_feature 1..20: note = Target: SCN10A; (+) strand; PAM type: YTN; PAM sequence: TTA
  source 1..20: mol_type = other DNA
ttctaaaagacaaagaaaag

SEQ ID NO: 74190 - DNA, 20 bp, synthetic construct
  misc_feature 1..20: note = Description of Artificial Sequence: Synthetic oligonucleotide
  misc_feature 1..20: note = Target: SCN10A; (+) strand; PAM type: YTN; PAM sequence: TTC
  source 1..20: mol_type = other DNA
taaaagacaaagaaaagtta

SEQ ID NO: 74191 - DNA, 20 bp, synthetic construct
  misc_feature 1..20: note = Description of Artificial Sequence: Synthetic oligonucleotide
  misc_feature 1..20: note = Target: SCN10A; (+) strand; PAM type: YTN; PAM sequence: CTA
  source 1..20: mol_type = other DNA
aaagacaaagaaaagttaga

SEQ ID NO: 74192 - DNA, 20 bp, synthetic construct
  misc_feature 1..20: note = Description of Artificial Sequence: Synthetic oligonucleotide
  misc_feature 1..20: note = Target: SCN10A; (+) strand; PAM type: YTN; PAM sequence: TTA
  source 1..20: mol_type = other DNA
gaaacttggagataagtgaa

SEQ ID NO: 74193 - DNA, 20 bp, synthetic construct
  misc_feature 1..20: note = Description of Artificial Sequence: Synthetic oligonucleotide
  misc_feature 1..20: note = Target: SCN10A; (+) strand; PAM type: YTN; PAM sequence: CTT
  source 1..20: mol_type = other DNA
ggagataagtgaagaggtac

SEQ ID NO: 74194 - DNA, 20 bp, synthetic construct
  misc_feature 1..20: note = Description of Artificial Sequence: Synthetic oligonucleotide
  misc_feature 1..20: note = Target: SCN10A; (+) strand; PAM type: YTN; PAM sequence: TTG
  source 1..20: mol_type = other DNA
gagataagtgaagaggtaca

SEQ ID NO: 74195 - DNA, 20 bp, synthetic construct
  misc_feature 1..20: note = Description of Artificial Sequence: Synthetic oligonucleotide
  misc_feature 1..20: note = Target: SCN10A; (+) strand; PAM type: YTN; PAM sequence: CTT
  source 1..20: mol_type = other DNA
tcatgggaattagtttcatc

SEQ ID NO: 74196 - DNA, 20 bp, synthetic construct
  misc_feature 1..20: note = Description of Artificial Sequence: Synthetic oligonucleotide
  misc_feature 1..20: note = Target: SCN10A; (+) strand; PAM type: YTN; PAM sequence: TTT
  source 1..20: mol_type = other DNA
catgggaattagtttcatca

SEQ ID NO: 74197 - DNA, 20 bp, synthetic construct
  misc_feature 1..20: note = Description of Artificial Sequence: Synthetic oligonucleotide
  misc_feature 1..20: note = Target: SCN10A; (+) strand; PAM type: YTN; PAM sequence: TTC
  source 1..20: mol_type = other DNA
atgggaattagtttcatcag

SEQ ID NO: 74198 - DNA, 20 bp, synthetic construct
  misc_feature 1..20: note = Description of Artificial Sequence: Synthetic oligonucleotide
  misc_feature 1..20: note = Target: SCN10A; (+) strand; PAM type: YTN; PAM sequence: TTA
  source 1..20: mol_type = other DNA
gtttcatcagattgtttggg

SEQ ID NO: 74199 - DNA, 20 bp, synthetic construct
  misc_feature 1..20: note = Description of Artificial Sequence: Synthetic oligonucleotide
  misc_feature 1..20: note = Target: SCN10A; (+) strand; PAM type: YTN; PAM sequence: TTT
  source 1..20: mol_type = other DNA
catcagattgtttgggtaac

SEQ ID NO: 74200 - DNA, 20 bp, synthetic construct
  misc_feature 1..20: note = Description of Artificial Sequence: Synthetic oligonucleotide
  misc_feature 1..20: note = Target: SCN10A; (+) strand; PAM type: YTN; PAM sequence: TTC
  source 1..20: mol_type = other DNA
atcagattgtttgggtaact

SEQ ID NO: 74201 - DNA, 20 bp, synthetic construct
  misc_feature 1..20: note = Description of Artificial Sequence: Synthetic oligonucleotide
  misc_feature 1..20: note = Target: SCN10A; (+) strand; PAM type: YTN; PAM sequence: TTG
  source 1..20: mol_type = other DNA
tttgggtaacttagttgaga

SEQ ID NO: 74202 - DNA, 20 bp, synthetic construct
  misc_feature 1..20: note = Description of Artificial Sequence: Synthetic oligonucleotide
  misc_feature 1..20: note = Target: SCN10A; (+) strand; PAM type: YTN; PAM sequence: TTT
  source 1..20: mol_type = other DNA
gggtaacttagttgagatca

SEQ ID NO: 74203 - DNA, 20 bp, synthetic construct
  misc_feature 1..20: note = Description of Artificial Sequence: Synthetic oligonucleotide
  misc_feature 1..20: note = Target: SCN10A; (+) strand; PAM type: YTN; PAM sequence: TTG
  source 1..20: mol_type = other DNA
ggtaacttagttgagatcag

SEQ ID NO: 74204 - DNA, 20 bp, synthetic construct
  misc_feature 1..20: note = Description of Artificial Sequence: Synthetic oligonucleotide
  misc_feature 1..20: note = Target: SCN10A; (+) strand; PAM type: YTN; PAM sequence: CTT
  source 1..20: mol_type = other DNA
agttgagatcagttccaccg

SEQ ID NO: 74205 - DNA, 20 bp, synthetic construct
  misc_feature 1..20: note = Description of Artificial Sequence: Synthetic oligonucleotide
  misc_feature 1..20: note = Target: SCN10A; (+) strand; PAM type: YTN; PAM sequence: TTA
  source 1..20: mol_type = other DNA
gttgagatcagttccaccga

SEQ ID NO: 74206 - DNA, 20 bp, synthetic construct
  misc_feature 1..20: note = Description of Artificial Sequence: Synthetic oligonucleotide
  misc_feature 1..20: note = Target: SCN10A; (+) strand; PAM type: YTN; PAM sequence: TTG
  source 1..20: mol_type = other DNA
agatcagttccaccgaggaa

SEQ ID NO: 74207 - DNA, 20 bp, synthetic construct
  misc_feature 1..20: note = Description of Artificial Sequence: Synthetic oligonucleotide
  misc_feature 1..20: note = Target: SCN10A; (+) strand; PAM type: YTN; PAM sequence: TTC
  source 1..20: mol_type = other DNA
caccgaggaaatggtcttct

SEQ ID NO: 74208 - DNA, 20 bp, synthetic construct
  misc_feature 1..20: note = Description of Artificial Sequence: Synthetic oligonucleotide
  misc_feature 1..20: note = Target: SCN10A; (+) strand; PAM type: YTN; PAM sequence: CTT
  source 1..20: mol_type = other DNA
ctgggtaggaacggtggagg

SEQ ID NO: 74209 - DNA, 20 bp, synthetic construct
  misc_feature 1..20: note = Description of Artificial Sequence: Synthetic oligonucleotide
  misc_feature 1..20: note = Target: SCN10A; (+) strand; PAM type: YTN; PAM sequence: TTC
  source 1..20: mol_type = other DNA
tgggtaggaacggtggaggc

SEQ ID NO: 74210 - DNA, 20 bp, synthetic construct
  misc_feature 1..20: note = Description of Artificial Sequence: Synthetic oligonucleotide
  misc_feature 1..20: note = Target: SCN10A; (+) strand; PAM type: YTN; PAM sequence: CTG
  source 1..20: mol_type = other DNA
ggtaggaacggtggaggcag

SEQ ID NO: 74211 - DNA, 20 bp, synthetic construct
  misc_feature 1..20: note = Description of Artificial Sequence: Synthetic oligonucleotide
  misc_feature 1..20: note = Target: SCN10A; (+) strand; PAM type: YTN; PAM sequence: CTG
  source 1..20: mol_type = other DNA
gctcaggaagaaaaccccaa

SEQ ID NO: 74212 - DNA, 20 bp, synthetic construct
  misc_feature 1..20: note = Description of Artificial Sequence: Synthetic oligonucleotide
  misc_feature 1..20: note = Target: SCN10A; (+) strand; PAM type: YTN; PAM sequence: CTC
  source 1..20: mol_type = other DNA
aggaagaaaaccccaagtag

SEQ ID NO: 74213 - DNA, 20 bp, synthetic construct
  misc_feature 1..20: note = Description of Artificial Sequence: Synthetic oligonucleotide
  misc_feature 1..20: note = Target: SCN10A; (+) strand; PAM type: YTN; PAM sequence: TTA
  source 1..20: mol_type = other DNA
ggctggagtggagaactctg

SEQ ID NO: 74214 - DNA, 20 bp, synthetic construct
  misc_feature 1..20: note = Description of Artificial Sequence: Synthetic oligonucleotide
  misc_feature 1..20: note = Target: SCN10A; (+) strand; PAM type: YTN; PAM sequence: CTG
  source 1..20: mol_type = other DNA
gagtggagaactctgaatag

SEQ ID NO: 74215 - DNA, 20 bp, synthetic construct
  misc_feature 1..20: note = Description of Artificial Sequence: Synthetic oligonucleotide
  misc_feature 1..20: note = Target: SCN10A; (+) strand; PAM type: YTN; PAM sequence: CTC
  source 1..20: mol_type = other DNA
tgaatagctagagtggagaa

SEQ ID NO: 74216 - DNA, 20 bp, synthetic construct
  misc_feature 1..20: note = Description of Artificial Sequence: Synthetic oligonucleotide
  misc_feature 1..20: note = Target: SCN10A; (+) strand; PAM type: YTN; PAM sequence: CTG
  source 1..20: mol_type = other DNA
aatagctagagtggagaata

SEQ ID NO: 74217 - DNA, 20 bp, synthetic construct
  misc_feature 1..20: note = Description of Artificial Sequence: Synthetic oligonucleotide
  misc_feature 1..20: note = Target: SCN10A; (+) strand; PAM type: YTN; PAM sequence: CTA
  source 1..20: mol_type = other DNA
gagtggagaatattgacagc

SEQ ID NO: 74218 - DNA, 20 bp, synthetic construct
  misc_feature 1..20: note = Description of Artificial Sequence: Synthetic oligonucleotide
  misc_feature 1..20: note = Target: SCN10A; (+) strand; PAM type: YTN; PAM sequence: TTG
  source 1..20: mol_type = other DNA
acagcagactatgggcaaag

SEQ ID NO: 74219 - DNA, 20 bp, synthetic construct
  misc_feature 1..20: note = Description of Artificial Sequence: Synthetic oligonucleotide
  misc_feature 1..20: note = Target: SCN10A; (+) strand; PAM type: YTN; PAM sequence: CTA
  source 1..20: mol_type = other DNA
tgggcaaagggattatcaaa

SEQ ID NO: 74220 - DNA, 20 bp, synthetic construct
  misc_feature 1..20: note = Description of Artificial Sequence: Synthetic oligonucleotide
  misc_feature 1..20: note = Target: SCN10A; (+) strand; PAM type: YTN; PAM sequence: TTA
  source 1..20: mol_type = other DNA
tcaaaaggggagggagacat

SEQ ID NO: 74221 - DNA, 20 bp, synthetic construct
  misc_feature 1..20: note = Description of Artificial Sequence: Synthetic oligonucleotide
  misc_feature 1..20: note = Target: SCN10A; (+) strand; PAM type: YTN; PAM sequence: TTG
  source 1..20: mol_type = other DNA
aaaggaaggtgggtggaagg

SEQ ID NO: 74222 - DNA, 20 bp, synthetic construct
  misc_feature 1..20: note = Description of Artificial Sequence: Synthetic oligonucleotide
  misc_feature 1..20: note = Target: SCN10A; (+) strand; PAM type: YTN; PAM sequence: TTG
  source 1..20: mol_type = other DNA
gtggggagaatctaaaggta

SEQ ID NO: 74223 - DNA, 20 bp, synthetic construct
  misc_feature 1..20: note = Description of Artificial Sequence: Synthetic oligonucleotide
  misc_feature 1..20: note = Target: SCN10A; (+) strand; PAM type: YTN; PAM sequence: CTA
  source 1..20: mol_type = other DNA
aaggtaaattgttcccactt

SEQ ID NO: 74224 - DNA, 20 bp, synthetic construct
  misc_feature 1..20: note = Description of Artificial Sequence: Synthetic oligonucleotide
  misc_feature 1..20: note = Target: SCN10A; (+) strand; PAM type: YTN; PAM sequence: TTG
  source 1..20: mol_type = other DNA
ttcccacttggacatttttc

SEQ ID NO: 74225 - DNA, 20 bp, synthetic construct
  misc_feature 1..20: note = Description of Artificial Sequence: Synthetic oligonucleotide
  misc_feature 1..20: note = Target: SCN10A; (+) strand; PAM type: YTN; PAM sequence: TTC
  source 1..20: mol_type = other DNA
ccacttggacatttttctta

SEQ ID NO: 74226 - DNA, 20 bp, synthetic construct
  misc_feature 1..20: note = Description of Artificial Sequence: Synthetic oligonucleotide
  misc_feature 1..20: note = Target: SCN10A; (+) strand; PAM type: YTN; PAM sequence: CTT
  source 1..20: mol_type = other DNA
ggacatttttcttaggaata

SEQ ID NO: 74227 - DNA, 20 bp, synthetic construct
  misc_feature 1..20: note = Description of Artificial Sequence: Synthetic oligonucleotide
  misc_feature 1..20: note = Target: SCN10A; (+) strand; PAM type: YTN; PAM sequence: TTG
  source 1..20: mol_type = other DNA
gacatttttcttaggaatag

SEQ ID NO: 74228 - DNA, 20 bp, synthetic construct
  misc_feature 1..20: note = Description of Artificial Sequence: Synthetic oligonucleotide
  misc_feature 1..20: note = Target: SCN10A; (+) strand; PAM type: YTN; PAM sequence: TTT
  source 1..20: mol_type = other DNA
ttcttaggaatagctgggct

SEQ ID NO: 74229 - DNA, 20 bp, synthetic construct
  misc_feature 1..20: note = Description of Artificial Sequence: Synthetic oligonucleotide
  misc_feature 1..20: note = Target: SCN10A; (+) strand; PAM type: YTN; PAM sequence: TTT
  source 1..20: mol_type = other DNA
tcttaggaatagctgggctc

SEQ ID NO: 74230 - DNA, 20 bp, synthetic construct
  misc_feature 1..20: note = Description of Artificial Sequence: Synthetic oligonucleotide
  misc_feature 1..20: note = Target: SCN10A; (+) strand; PAM type: YTN; PAM sequence: TTT
  source 1..20: mol_type = other DNA
cttaggaatagctgggctcc

SEQ ID NO: 74231 - DNA, 20 bp, synthetic construct
  misc_feature 1..20: note = Description of Artificial Sequence: Synthetic oligonucleotide
  misc_feature 1..20: note = Target: SCN10A; (+) strand; PAM type: YTN; PAM sequence: TTC
  source 1..20: mol_type = other DNA
ttaggaatagctgggctccc

SEQ ID NO: 74232 - DNA, 20 bp, synthetic construct
  misc_feature 1..20: note = Description of Artificial Sequence: Synthetic oligonucleotide
  misc_feature 1..20: note = Target: SCN10A; (+) strand; PAM type: YTN; PAM sequence: CTT
  source 1..20: mol_type = other DNA
aggaatagctgggctcccaa

SEQ ID NO: 74233 - DNA, 20 bp, synthetic construct
  misc_feature 1..20: note = Description of Artificial Sequence: Synthetic oligonucleotide
  misc_feature 1..20: note = Target: SCN10A; (+) strand; PAM type: YTN; PAM sequence: TTA
  source 1..20: mol_type = other DNA
ggaatagctgggctcccaac

SEQ ID NO: 74234 - DNA, 20 bp, synthetic construct
  misc_feature 1..20: note = Description of Artificial Sequence: Synthetic oligonucleotide
  misc_feature 1..20: note = Target: SCN10A; (+) strand; PAM type: YTN; PAM sequence: CTG
  source 1..20: mol_type = other DNA
ggctcccaacagtgcttcct

SEQ ID NO: 74235 - DNA, 20 bp, synthetic construct
  misc_feature 1..20: note = Description of Artificial Sequence: Synthetic oligonucleotide
  misc_feature 1..20: note = Target: SCN10A; (+) strand; PAM type: YTN; PAM sequence: CTC
  source 1..20: mol_type = other DNA
ccaacagtgcttcctaagga

SEQ ID NO: 74236 - DNA, 20 bp, synthetic construct
  misc_feature 1..20: note = Description of Artificial Sequence: Synthetic oligonucleotide
  misc_feature 1..20: note = Target: SCN10A; (+) strand; PAM type: YTN; PAM sequence: CTT
  source 1..20: mol_type = other DNA
cctaaggaaaaataaaactt

SEQ ID NO: 74237 - DNA, 20 bp, synthetic construct
  misc_feature 1..20: note = Description of Artificial Sequence: Synthetic oligonucleotide
  misc_feature 1..20: note = Target: SCN10A; (+) strand; PAM type: YTN; PAM sequence: TTC
  source 1..20: mol_type = other DNA
ctaaggaaaaataaaacttg

SEQ ID NO: 74238 - DNA, 20 bp, synthetic construct
  misc_feature 1..20: note = Description of Artificial Sequence: Synthetic oligonucleotide
  misc_feature 1..20: note = Target: SCN10A; (+) strand; PAM type: YTN; PAM sequence: CTA
  source 1..20: mol_type = other DNA
aggaaaaataaaacttgaag

SEQ ID NO: 74239 - DNA, 20 bp, synthetic construct
  misc_feature 1..20: note = Description of Artificial Sequence: Synthetic oligonucleotide
  misc_feature 1..20: note = Target: SCN10A; (+) strand; PAM type: YTN; PAM sequence: CTT
  source 1..20: mol_type = other DNA
gaagataaacttgacctaca

SEQ ID NO: 74240 - DNA, 20 bp, synthetic construct
  misc_feature 1..20: note = Description of Artificial Sequence: Synthetic oligonucleotide
  misc_feature 1..20: note = Target: SCN10A; (+) strand; PAM type: YTN; PAM sequence: TTG
  source 1..20: mol_type = other DNA
aagataaacttgacctacag

SEQ ID NO: 74241 - DNA, 20 bp, synthetic construct
  misc_feature 1..20: note = Description of Artificial Sequence: Synthetic oligonucleotide
  misc_feature 1..20: note = Target: SCN10A; (+) strand; PAM type: YTN; PAM sequence: CTT
  source 1..20: mol_type = other DNA
gacctacagagagagtacaa

SEQ ID NO: 74242 - DNA, 20 bp, synthetic construct
  misc_feature 1..20: note = Description of Artificial Sequence: Synthetic oligonucleotide
  misc_feature 1..20: note = Target: SCN10A; (+) strand; PAM type: YTN; PAM sequence: TTG
  source 1..20: mol_type = other DNA
acctacagagagagtacaac

SEQ ID NO: 74243 - DNA, 20 bp, synthetic construct
  misc_feature 1..20: note = Description of Artificial Sequence: Synthetic oligonucleotide
  misc_feature 1..20: note = Target: SCN10A; (+) strand; PAM type: YTN; PAM sequence: CTA
  source 1..20: mol_type = other DNA
cagagagagtacaacactca

SEQ ID NO: 74244 - DNA, 20 bp, synthetic construct
  misc_feature 1..20: note = Description of Artificial Sequence: Synthetic oligonucleotide
  misc_feature 1..20: note = Target: SCN10A; (+) strand; PAM type: YTN; PAM sequence: CTC
  source 1..20: mol_type = other DNA
atttttcaatttgagcagaa

SEQ ID NO: 74245 - DNA, 20 bp, synthetic construct
  misc_feature 1..20: note = Description of Artificial Sequence: Synthetic oligonucleotide
  misc_feature 1..20: note = Target: SCN10A; (+) strand; PAM type: YTN; PAM sequence: TTT
  source 1..20: mol_type = other DNA
ttcaatttgagcagaagtat

SEQ ID NO: 74246 - DNA, 20 bp, synthetic construct
  misc_feature 1..20: note = Description of Artificial Sequence: Synthetic oligonucleotide
  misc_feature 1..20: note = Target: SCN10A; (+) strand; PAM type: YTN; PAM sequence: TTT
  source 1..20: mol_type = other DNA
tcaatttgagcagaagtatt

SEQ ID NO: 74247 - DNA, 20 bp, synthetic construct
  misc_feature 1..20: note = Description of Artificial Sequence: Synthetic oligonucleotide
  misc_feature 1..20: note = Target: SCN10A; (+) strand; PAM type: YTN; PAM sequence: TTT
  source 1..20: mol_type = other DNA
caatttgagcagaagtattt

SEQ ID NO: 74248 - DNA, 20 bp, synthetic construct
  misc_feature 1..20: note = Description of Artificial Sequence: Synthetic oligonucleotide
  misc_feature 1..20: note = Target: SCN10A; (+) strand; PAM type: YTN; PAM sequence: TTC
  source 1..20: mol_type = other DNA
aatttgagcagaagtattta

SEQ ID NO: 74249 - DNA, 20 bp, synthetic construct
  misc_feature 1..20: note = Description of Artificial Sequence: Synthetic oligonucleotide
  misc_feature 1..20: note = Target: SCN10A; (+) strand; PAM type: YTN; PAM sequence: TTT
  source 1..20: mol_type = other DNA
gagcagaagtatttaaatgt

SEQ ID NO: 74250 - DNA, 20 bp, synthetic construct
  misc_feature 1..20: note = Description of Artificial Sequence: Synthetic oligonucleotide
  misc_feature 1..20: note = Target: SCN10A; (+) strand; PAM type: YTN; PAM sequence: TTG
  source 1..20: mol_type = other DNA
agcagaagtatttaaatgta

SEQ ID NO: 74251 - DNA, 20 bp, synthetic construct
  misc_feature 1..20: note = Description of Artificial Sequence: Synthetic oligonucleotide
  misc_feature 1..20: note = Target: SCN10A; (+) strand; PAM type: YTN; PAM sequence: TTT
  source 1..20: mol_type = other DNA
aaatgtattttagttttctg

SEQ ID NO: 74252 - DNA, 20 bp, synthetic construct
  misc_feature 1..20: note = Description of Artificial Sequence: Synthetic oligonucleotide
  misc_feature 1..20: note = Target: SCN10A; (+) strand; PAM type: YTN; PAM sequence: TTA
  source 1..20: mol_type = other DNA
aatgtattttagttttctgt

SEQ ID NO: 74253 - DNA, 20 bp, synthetic construct
  misc_feature 1..20: note = Description of Artificial Sequence: Synthetic oligonucleotide
  misc_feature 1..20: note = Target: SCN10A; (+) strand; PAM type: YTN; PAM sequence: TTT
  source 1..20: mol_type = other DNA
tagttttctgtaaatgcctt

SEQ ID NO: 74254 - DNA, 20 bp, synthetic construct
  misc_feature 1..20: note = Description of Artificial Sequence: Synthetic oligonucleotide
  misc_feature 1..20: note = Target: SCN10A; (+) strand; PAM type: YTN; PAM sequence: TTT
  source 1..20: mol_type = other DNA
agttttctgtaaatgccttg

SEQ ID NO: 74255 - DNA, 20 bp, synthetic construct
  misc_feature 1..20: note = Description of Artificial Sequence: Synthetic oligonucleotide
  misc_feature 1..20: note = Target: SCN10A; (+) strand; PAM type: YTN; PAM sequence: TTA
  source 1..20: mol_type = other DNA
gttttctgtaaatgccttga

SEQ ID NO: 74256 - DNA, 20 bp, synthetic construct
  misc_feature 1..20: note = Description of Artificial Sequence: Synthetic oligonucleotide
  misc_feature 1..20: note = Target: SCN10A; (+) strand; PAM type: YTN; PAM sequence: TTT
  source 1..20: mol_type = other DNA
tctgtaaatgccttgatgtg

SEQ ID NO: 74257 - DNA, 20 bp, synthetic construct
  misc_feature 1..20: note = Description of Artificial Sequence: Synthetic oligonucleotide
  misc_feature 1..20: note = Target: SCN10A; (+) strand; PAM type: YTN; PAM sequence: TTT
  source 1..20: mol_type = other DNA
ctgtaaatgccttgatgtgt

SEQ ID NO: 74258 - DNA, 20 bp, synthetic construct
  misc_feature 1..20: note = Description of Artificial Sequence: Synthetic oligonucleotide
  misc_feature 1..20: note = Target: SCN10A; (+) strand; PAM type: YTN; PAM sequence: TTC
  source 1..20: mol_type = other DNA
tgtaaatgccttgatgtgtc

SEQ ID NO: 74259 - DNA, 20 bp, synthetic construct
  misc_feature 1..20: note = Description of Artificial Sequence: Synthetic oligonucleotide
  misc_feature 1..20: note = Target: SCN10A; (+) strand; PAM type: YTN; PAM sequence: CTG
  source 1..20: mol_type = other DNA
taaatgccttgatgtgtcta

SEQ ID NO: 74260 - DNA, 20 bp, synthetic construct
  misc_feature 1..20: note = Description of Artificial Sequence: Synthetic oligonucleotide
  misc_feature 1..20: note = Target: SCN10A; (+) strand; PAM type: YTN; PAM sequence: CTT
  source 1..20: mol_type = other DNA
gatgtgtctagttttacagt

SEQ ID NO: 74261 - DNA, 20 bp, synthetic construct
  misc_feature 1..20: note = Description of Artificial Sequence: Synthetic oligonucleotide
  misc_feature 1..20: note = Target: SCN10A; (+) strand; PAM type: YTN; PAM sequence: TTG
  source 1..20: mol_type = other DNA
atgtgtctagttttacagtt

SEQ ID NO: 74262 - DNA, 20 bp, synthetic construct
  misc_feature 1..20: note = Description of Artificial Sequence: Synthetic oligonucleotide
  misc_feature 1..20: note = Target: SCN10A; (+) strand; PAM type: YTN; PAM sequence: CTA
  source 1..20: mol_type = other DNA
gttttacagttacttaggaa

SEQ ID NO: 74263 - DNA, 20 bp, synthetic construct
  misc_feature 1..20: note = Description of Artificial Sequence: Synthetic oligonucleotide
  misc_feature 1..20: note = Target: SCN10A; (+) strand; PAM type: YTN; PAM sequence: TTT
  source 1..20: mol_type = other DNA
tacagttacttaggaacaca

SEQ ID NO: 74264 - DNA, 20 bp, synthetic construct
  misc_feature 1..20: note = Description of Artificial Sequence: Synthetic oligonucleotide
  misc_feature 1..20: note = Target: SCN10A; (+) strand; PAM type: YTN; PAM sequence: TTT
  source 1..20: mol_type = other DNA
acagttacttaggaacacat

SEQ ID NO: 74265 - DNA, 20 bp, synthetic construct
  misc_feature 1..20: note = Description of Artificial Sequence: Synthetic oligonucleotide
  misc_feature 1..20: note = Target: SCN10A; (+) strand; PAM type: YTN; PAM sequence: TTA
  source 1..20: mol_type = other DNA
cagttacttaggaacacatc

SEQ ID NO: 74266 - DNA, 20 bp, synthetic construct
  misc_feature 1..20: note = Description of Artificial Sequence: Synthetic oligonucleotide
  misc_feature 1..20: note = Target: SCN10A; (+) strand; PAM type: YTN; PAM sequence: TTA
  source 1..20: mol_type = other DNA
cttaggaacacatctattat

SEQ ID NO: 74267 - DNA, 20 bp, synthetic construct
  misc_feature 1..20: note = Description of Artificial Sequence: Synthetic oligonucleotide
  misc_feature 1..20: note = Target: SCN10A; (+) strand; PAM type: YTN; PAM sequence: CTT
  source 1..20: mol_type = other DNA
aggaacacatctattatgaa

SEQ ID NO: 74268 - DNA, 20 bp, synthetic construct
  misc_feature 1..20: note = Description of Artificial Sequence: Synthetic oligonucleotide
  misc_feature 1..20: note = Target: SCN10A; (+) strand; PAM type: YTN; PAM sequence: TTA
  source 1..20: mol_type = other DNA
ggaacacatctattatgaaa

SEQ ID NO: 74269 - DNA, 20 bp, synthetic construct
  misc_feature 1..20: note = Description of Artificial Sequence: Synthetic oligonucleotide
  misc_feature 1..20: note = Target: SCN10A; (+) strand; PAM type: YTN; PAM sequence: CTA
  source 1..20: mol_type = other DNA
ttatgaaaaggaaaattcta

SEQ ID NO: 74270 - DNA, 20 bp, synthetic construct
  misc_feature 1..20: note = Description of Artificial Sequence: Synthetic oligonucleotide
  misc_feature 1..20: note = Target: SCN10A; (+) strand; PAM type: YTN; PAM sequence: TTA
  source 1..20: mol_type = other DNA
tgaaaaggaaaattctatta

SEQ ID NO: 74271 - DNA, 20 bp, synthetic construct
  misc_feature 1..20: note = Description of Artificial Sequence: Synthetic oligonucleotide
  misc_feature 1..20: note = Target: SCN10A; (+) strand; PAM type: YTN; PAM sequence: TTC
  source 1..20: mol_type = other DNA
tattaattaaaccacatttt

SEQ ID NO: 74272 - DNA, 20 bp, synthetic construct
  misc_feature 1..20: note = Description of Artificial Sequence: Synthetic oligonucleotide
  misc_feature 1..20: note = Target: SCN10A; (+) strand; PAM type: YTN; PAM sequence: CTA
  source 1..20: mol_type = other DNA
ttaattaaaccacattttcc

SEQ ID NO: 74273 - DNA, 20 bp, synthetic construct
  misc_feature 1..20: note = Description of Artificial Sequence: Synthetic oligonucleotide
  misc_feature 1..20: note = Target: SCN10A; (+) strand; PAM type: YTN; PAM sequence: TTA
  source 1..20: mol_type = other DNA
attaaaccacattttcctgc

SEQ ID NO: 74274 - DNA, 20 bp, synthetic construct
  misc_feature 1..20: note = Description of Artificial Sequence: Synthetic oligonucleotide
  misc_feature 1..20: note = Target: SCN10A; (+) strand; PAM type: YTN; PAM sequence: TTA
  source 1..20: mol_type = other DNA
aaccacattttcctgctgac

SEQ ID NO: 74275 - DNA, 20 bp, synthetic construct
  misc_feature 1..20: note = Description of Artificial Sequence: Synthetic oligonucleotide
  misc_feature 1..20: note = Target: SCN10A; (+) strand; PAM type: YTN; PAM sequence: TTT
  source 1..20: mol_type = other DNA
tcctgctgacttacaattaa

SEQ ID NO: 74276 - DNA, 20 bp, synthetic construct
  misc_feature 1..20: note = Description of Artificial Sequence: Synthetic oligonucleotide
  misc_feature 1..20: note = Target: SCN10A; (+) strand; PAM type: YTN; PAM sequence: TTT
  source 1..20: mol_type = other DNA
cctgctgacttacaattaaa

SEQ ID NO: 74277 - DNA, 20 bp, synthetic construct
  misc_feature 1..20: note = Description of Artificial Sequence: Synthetic oligonucleotide
  misc_feature 1..20: note = Target: SCN10A; (+) strand; PAM type: YTN; PAM sequence: TTC
  source 1..20: mol_type = other DNA
ctgctgacttacaattaaat

SEQ ID NO: 74278 - DNA, 20 bp, synthetic construct
  misc_feature 1..20: note = Description of Artificial Sequence: Synthetic oligonucleotide
  misc_feature 1..20: note = Target: SCN10A; (+) strand; PAM type: YTN; PAM sequence: CTG
  source 1..20: mol_type = other DNA
ctgacttacaattaaattaa

SEQ ID NO: 74279 - DNA, 20 bp, synthetic construct
  misc_feature 1..20: note = Description of Artificial Sequence: Synthetic oligonucleotide
  misc_feature 1..20: note = Target: SCN10A; (+) strand; PAM type: YTN; PAM sequence: CTG
  source 1..20: mol_type = other DNA
acttacaattaaattaagaa

SEQ ID NO: 74280 - DNA, 20 bp, synthetic construct
  misc_feature 1..20: note = Description of Artificial Sequence: Synthetic oligonucleotide
  misc_feature 1..20: note = Target: SCN10A; (+) strand; PAM type: YTN; PAM sequence: CTT
  source 1..20: mol_type = other DNA
acaattaaattaagaaatat

SEQ ID NO: 74281 - DNA, 20 bp, synthetic construct
  misc_feature 1..20: note = Description of Artificial Sequence: Synthetic oligonucleotide
  misc_feature 1..20: note = Target: SCN10A; (+) strand; PAM type: YTN; PAM sequence: TTA
  source 1..20: mol_type = other DNA
caattaaattaagaaatatg

SEQ ID NO: 74282 - DNA, 20 bp, synthetic construct
  misc_feature 1..20: note = Description of Artificial Sequence: Synthetic oligonucleotide
  misc_feature 1..20: note = Target: SCN10A; (+) strand; PAM type: YTN; PAM sequence: TTA
  source 1..20: mol_type = other DNA
aattaagaaatatgctcaca

SEQ ID NO: 74283 - DNA, 20 bp, synthetic construct
  misc_feature 1..20: note = Description of Artificial Sequence: Synthetic oligonucleotide
  misc_feature 1..20: note = Target: SCN10A; (+) strand; PAM type: YTN; PAM sequence: TTA
  source 1..20: mol_type = other DNA
agaaatatgctcacatgggg

SEQ ID NO: 74284 - DNA, 20 bp, synthetic construct
  misc_feature 1..20: note = Description of Artificial Sequence: Synthetic oligonucleotide
  misc_feature 1..20: note = Target: SCN10A; (+) strand; PAM type: YTN; PAM sequence: CTC
  source 1..20: mol_type = other DNA
acatggggggaaatgttaat

SEQ ID NO: 74285 - DNA, 20 bp, synthetic construct
  misc_feature 1..20: note = Description of Artificial Sequence: Synthetic oligonucleotide
  misc_feature 1..20: note = Target: SCN10A; (+) strand; PAM type: YTN; PAM sequence: TTA
  source 1..20: mol_type = other DNA
atccaaggattaaactaaaa

SEQ ID NO: 74286 - DNA, 20 bp, synthetic construct
  misc_feature 1..20: note = Description of Artificial Sequence: Synthetic oligonucleotide
  misc_feature 1..20: note = Target: SCN10A; (+) strand; PAM type: YTN; PAM sequence: TTA
  source 1..20: mol_type = other DNA
aactaaaatcgtgtctccaa

SEQ ID NO: 74287 - DNA, 20 bp, synthetic construct
  misc_feature 1..20: note = Description of Artificial Sequence: Synthetic oligonucleotide
  misc_feature 1..20: note = Target: SCN10A; (+) strand; PAM type: YTN; PAM sequence: CTA
  source 1..20: mol_type = other DNA
aaatcgtgtctccaattcta

SEQ ID NO: 74288 - DNA, 20 bp, synthetic construct
  misc_feature 1..20: note = Description of Artificial Sequence: Synthetic oligonucleotide
  misc_feature 1..20: note = Target: SCN10A; (+) strand; PAM type: YTN; PAM sequence: CTC
  source 1..20: mol_type = other DNA
caattctacaaatatttaaa

SEQ ID NO: 74289 - DNA, 20 bp, synthetic construct
  misc_feature 1..20: note = Description of Artificial Sequence: Synthetic oligonucleotide
  misc_feature 1..20: note = Target: SCN10A; (+) strand; PAM type: YTN; PAM sequence: TTC
  source 1..20: mol_type = other DNA
tacaaatatttaaaagtaat

SEQ ID NO: 74290 - DNA, 20 bp, synthetic construct
  misc_feature 1..20: note = Description of Artificial Sequence: Synthetic oligonucleotide
  misc_feature 1..20: note = Target: SCN10A; (+) strand; PAM type: YTN; PAM sequence: CTA
  source 1..20: mol_type = other DNA
caaatatttaaaagtaatat

SEQ ID NO: 74291 - DNA, 20 bp, synthetic construct
  misc_feature 1..20: note = Description of Artificial Sequence: Synthetic oligonucleotide
  misc_feature 1..20: note = Target: SCN10A; (+) strand; PAM type: YTN; PAM sequence: TTT
  source 1..20: mol_type = other DNA
aaaagtaatatatcttatgt

SEQ ID NO: 74292 - DNA, 20 bp, synthetic construct
  misc_feature 1..20: note = Description of Artificial Sequence: Synthetic oligonucleotide
  misc_feature 1..20: note = Target: SCN10A; (+) strand; PAM type: YTN; PAM sequence: TTA
  source 1..20: mol_type = other DNA
aaagtaatatatcttatgta

SEQ ID NO: 74293 - DNA, 20 bp, synthetic construct
  misc_feature 1..20: note = Description of Artificial Sequence: Synthetic oligonucleotide
  misc_feature 1..20: note = Target: SCN10A; (+) strand; PAM type: YTN; PAM sequence: CTT
  source 1..20: mol_type = other DNA
atgtataatattagttatga

SEQ ID NO: 74294 - DNA, 20 bp, synthetic construct
  misc_feature 1..20: note = Description of Artificial Sequence: Synthetic oligonucleotide
  misc_feature 1..20: note = Target: SCN10A; (+) strand; PAM type: YTN; PAM sequence: TTA
  source 1..20: mol_type = other DNA
tgtataatattagttatgaa

SEQ ID NO: 74295 - DNA, 20 bp, synthetic construct
  misc_feature 1..20: note = Description of Artificial Sequence: Synthetic oligonucleotide
  misc_feature 1..20: note = Target: SCN10A; (+) strand; PAM type: YTN; PAM sequence: TTA
  source 1..20: mol_type = other DNA
gttatgaaaacattcatagc

SEQ ID NO: 74296 - DNA, 20 bp, synthetic construct
  misc_feature 1..20: note = Description of Artificial Sequence: Synthetic oligonucleotide
  misc_feature 1..20: note = Target: SCN10A; (+) strand; PAM type: YTN; PAM sequence: TTA
  source 1..20: mol_type = other DNA
tgaaaacattcatagcaaat

SEQ ID NO: 74297 - DNA, 20 bp, synthetic construct
  misc_feature 1..20: note = Description of Artificial Sequence: Synthetic oligonucleotide
  misc_feature 1..20: note = Target: SCN10A; (+) strand; PAM type: YTN; PAM sequence: TTC
  source 1..20: mol_type = other DNA
atagcaaatgtgattagaat

SEQ ID NO: 74298 - DNA, 20 bp, synthetic construct
  misc_feature 1..20: note = Description of Artificial Sequence: Synthetic oligonucleotide
  misc_feature 1..20: note = Target: SCN10A; (+) strand; PAM type: YTN; PAM sequence: TTA
  source 1..20: mol_type = other DNA
gaattatatttttggtgaaa

SEQ ID NO: 74299 - DNA, 20 bp, synthetic construct
  misc_feature 1..20: note = Description of Artificial Sequence: Synthetic oligonucleotide
  misc_feature 1..20: note = Target: SCN10A; (+) strand; PAM type: YTN; PAM sequence: TTA
  source 1..20: mol_type = other DNA
tatttttggtgaaatattaa

SEQ ID NO: 74300 - DNA, 20 bp, synthetic construct
  misc_feature 1..20: note = Description of Artificial Sequence: Synthetic oligonucleotide
  misc_feature 1..20: note = Target: SCN10A; (+) strand; PAM type: YTN; PAM sequence: TTT
  source 1..20: mol_type = other DNA
ttggtgaaatattaataata

SEQ ID NO: 74301 - DNA, 20 bp, synthetic construct
  misc_feature 1..20: note = Description of Artificial Sequence: Synthetic oligonucleotide
  misc_feature 1..20: note = Target: SCN10A; (+) strand; PAM type: YTN; PAM sequence: TTT
  source 1..20: mol_type = other DNA
tggtgaaatattaataatag

SEQ ID NO: 74302 - DNA, 20 bp, synthetic construct
  misc_feature 1..20: note = Description of Artificial Sequence: Synthetic oligonucleotide
  misc_feature 1..20: note = Target: SCN10A; (+) strand; PAM type: YTN; PAM sequence: TTT
  source 1..20: mol_type = other DNA
ggtgaaatattaataatagg

SEQ ID NO: 74303 - DNA, 20 bp, synthetic construct
  misc_feature 1..20: note = Description of Artificial Sequence: Synthetic oligonucleotide
  misc_feature 1..20: note = Target: SCN10A; (+) strand; PAM type: YTN; PAM sequence: TTG
  source 1..20: mol_type = other DNA
gtgaaatattaataataggg

SEQ ID NO: 74304 - DNA, 20 bp, synthetic construct
  misc_feature 1..20: note = Description of Artificial Sequence: Synthetic oligonucleotide
  misc_feature 1..20: note = Target: SCN10A; (+) strand; PAM type: YTN; PAM sequence: TTA
  source 1..20: mol_type = other DNA
ataatagggccctgagaatt

SEQ ID NO: 74305 - DNA, 20 bp, synthetic construct
  misc_feature 1..20: note = Description of Artificial Sequence: Synthetic oligonucleotide
  misc_feature 1..20: note = Target: SCN10A; (+) strand; PAM type: YTN; PAM sequence: CTG
  source 1..20: mol_type = other DNA
agaattctagtatcttttgg

SEQ ID NO: 74306 - DNA, 20 bp, synthetic construct
  misc_feature 1..20: note = Description of Artificial Sequence: Synthetic oligonucleotide
  misc_feature 1..20: note = Target: SCN10A; (+) strand; PAM type: YTN; PAM sequence: TTC
  source 1..20: mol_type = other DNA
tagtatcttttggggctgga

SEQ ID NO: 74307 - DNA, 20 bp, synthetic construct
  misc_feature 1..20: note = Description of Artificial Sequence: Synthetic oligonucleotide
  misc_feature 1..20: note = Target: SCN10A; (+) strand; PAM type: YTN; PAM sequence: CTA
  source 1..20: mol_type = other DNA
gtatcttttggggctggagt

SEQ ID NO: 74308 - DNA, 20 bp, synthetic construct
  misc_feature 1..20: note = Description of Artificial Sequence: Synthetic oligonucleotide
  misc_feature 1..20: note = Target: SCN10A; (+) strand; PAM type: YTN; PAM sequence: CTT
  source 1..20: mol_type = other DNA
ttggggctggagttaccaaa

SEQ ID NO: 74309 - DNA, 20 bp, synthetic construct
  misc_feature 1..20: note = Description of Artificial Sequence: Synthetic oligonucleotide
  misc_feature 1..20: note = Target: SCN10A; (+) strand; PAM type: YTN; PAM sequence: TTT
  source 1..20: mol_type = other DNA
tggggctggagttaccaaat

SEQ ID NO: 74310 - DNA, 20 bp, synthetic construct
  misc_feature 1..20: note = Description of Artificial Sequence: Synthetic oligonucleotide
  misc_feature 1..20: note = Target: SCN10A; (+) strand; PAM type: YTN; PAM sequence: TTT
  source 1..20: mol_type = other DNA
ggggctggagttaccaaatt

SEQ ID NO: 74311 - DNA, 20 bp, synthetic construct
  misc_feature 1..20: note = Description of Artificial Sequence: Synthetic oligonucleotide
  misc_feature 1..20: note = Target: SCN10A; (+) strand; PAM type: YTN; PAM sequence: TTG
  source 1..20: mol_type = other DNA
gggctggagttaccaaattt

SEQ ID NO: 74312 - DNA, 20 bp, synthetic construct
  misc_feature 1..20: note = Description of Artificial Sequence: Synthetic oligonucleotide
  misc_feature 1..20: note = Target: SCN10A; (+) strand; PAM type: YTN; PAM sequence: CTG
  source 1..20: mol_type = other DNA
gagttaccaaatttatgaga

SEQ ID NO: 74313 - DNA, 20 bp, synthetic construct
  misc_feature 1..20: note = Description of Artificial Sequence: Synthetic oligonucleotide
  misc_feature 1..20: note = Target: SCN10A; (+) strand; PAM type: YTN; PAM sequence: TTA
  source 1..20: mol_type = other DNA
ccaaatttatgagatttaaa

SEQ ID NO: 74314 - DNA, 20 bp, synthetic construct
  misc_feature 1..20: note = Description of Artificial Sequence: Synthetic oligonucleotide
  misc_feature 1..20: note = Target: SCN10A; (+) strand; PAM type: YTN; PAM sequence: TTT
  source 1..20: mol_type = other DNA
atgagatttaaatgcagact

SEQ ID NO: 74315 - DNA, 20 bp, synthetic construct
  misc_feature 1..20: note = Description of Artificial Sequence: Synthetic oligonucleotide
  misc_feature 1..20: note = Target: SCN10A; (+) strand; PAM type: YTN; PAM sequence: TTA
  source 1..20: mol_type = other DNA
tgagatttaaatgcagactt

SEQ ID NO: 74316 - DNA, 20 bp, synthetic construct
  misc_feature 1..20: note = Description of Artificial Sequence: Synthetic oligonucleotide
  misc_feature 1..20: note = Target: SCN10A; (+) strand; PAM type: YTN; PAM sequence: TTT
  source 1..20: mol_type = other DNA
aaatgcagacttttgtgagg

SEQ ID NO: 74317 - DNA, 20 bp, synthetic construct
  misc_feature 1..20: note = Description of Artificial Sequence: Synthetic oligonucleotide
  misc_feature 1..20: note = Target: SCN10A; (+) strand; PAM type: YTN; PAM sequence: TTA
  source 1..20: mol_type = other DNA
aatgcagacttttgtgagga

SEQ ID NO: 74318 - DNA, 20 bp, synthetic construct
  misc_feature 1..20: note = Description of Artificial Sequence: Synthetic oligonucleotide
  misc_feature 1..20: note = Target: SCN10A; (+) strand; PAM type: YTN; PAM sequence: CTT
  source 1..20: mol_type = other DNA
ttgtgaggaagagaccccct

SEQ ID NO: 74319 - DNA, 20 bp, synthetic construct
  misc_feature 1..20: note = Description of Artificial Sequence: Synthetic oligonucleotide
  misc_feature 1..20: note = Target: SCN10A; (+) strand; PAM type: YTN; PAM sequence: TTT
  source 1..20: mol_type = other DNA
tgtgaggaagagaccccctc

SEQ ID NO: 74320 - DNA, 20 bp, synthetic construct
  misc_feature 1..20: note = Description of Artificial Sequence: Synthetic oligonucleotide
  misc_feature 1..20: note = Target: SCN10A; (+) strand; PAM type: YTN; PAM sequence: TTT
  source 1..20: mol_type = other DNA
gtgaggaagagaccccctca

SEQ ID NO: 74321 - DNA, 20 bp, synthetic construct
  misc_feature 1..20: note = Description of Artificial Sequence: Synthetic oligonucleotide
  misc_feature 1..20: note = Target: SCN10A; (+) strand; PAM type: YTN; PAM sequence: TTG
  source 1..20: mol_type = other DNA
tgaggaagagaccccctcaa

SEQ ID NO: 74322 - DNA, 20 bp, synthetic construct
  misc_feature 1..20: note = Description of Artificial Sequence: Synthetic oligonucleotide
  misc_feature 1..20: note = Target: SCN10A; (+) strand; PAM type: YTN; PAM sequence: CTC
  source 1..20: mol_type = other DNA
aacagcttttctgtccagct

SEQ ID NO: 74323 - DNA, 20 bp, synthetic construct
  misc_feature 1..20: note = Description of Artificial Sequence: Synthetic oligonucleotide
  misc_feature 1..20: note = Target: SCN10A; (+) strand; PAM type: YTN; PAM sequence: CTT
  source 1..20: mol_type = other DNA
ttctgtccagctgtgactct

SEQ ID NO: 74324 - DNA, 20 bp, synthetic construct
  misc_feature 1..20: note = Description of Artificial Sequence: Synthetic oligonucleotide
  misc_feature 1..20: note = Target: SCN10A; (+) strand; PAM type: YTN; PAM sequence: TTT
  source 1..20: mol_type = other DNA
tctgtccagctgtgactcta

SEQ ID NO: 74325 - DNA, 20 bp, synthetic construct
  misc_feature 1..20: note = Description of Artificial Sequence: Synthetic oligonucleotide
  misc_feature 1..20: note = Target: SCN10A; (+) strand; PAM type: YTN; PAM sequence: TTT
  source 1..20: mol_type = other DNA
ctgtccagctgtgactctac

SEQ ID NO: 74326 - DNA, 20 bp, synthetic construct
  misc_feature 1..20: note = Description of Artificial Sequence: Synthetic oligonucleotide
  misc_feature 1..20: note = Target: SCN10A; (+) strand; PAM type: YTN; PAM sequence: TTC
  source 1..20: mol_type = other DNA
tgtccagctgtgactctacc

SEQ ID NO: 74327 - DNA, 20 bp, synthetic construct
  misc_feature 1..20: note = Description of Artificial Sequence: Synthetic oligonucleotide
  misc_feature 1..20: note = Target: SCN10A; (+) strand; PAM type: YTN; PAM sequence: CTG
  source 1..20: mol_type = other DNA
tccagctgtgactctaccaa

SEQ ID NO: 74328 - DNA, 20 bp, synthetic construct
  misc_feature 1..20: note = Description of Artificial Sequence: Synthetic oligonucleotide
  misc_feature 1..20: note = Target: SCN10A; (+) strand; PAM type: YTN; PAM sequence: CTG
  source 1..20: mol_type = other DNA
tgactctaccaagcaattat

SEQ ID NO: 74329 - DNA, 20 bp, synthetic construct
  misc_feature 1..20: note = Description of Artificial Sequence: Synthetic oligonucleotide
  misc_feature 1..20: note = Target: SCN10A; (+) strand; PAM type: YTN; PAM sequence: CTC
  source 1..20: mol_type = other DNA
taccaagcaattatttactc

SEQ ID NO: 74330 - DNA, 20 bp, synthetic construct
  misc_feature 1..20: note = Description of Artificial Sequence: Synthetic oligonucleotide
  misc_feature 1..20: note = Target: SCN10A; (+) strand; PAM type: YTN; PAM sequence: CTA
  source 1..20: mol_type = other DNA
ccaagcaattatttactcat

SEQ ID NO: 74331 - DNA, 20 bp, synthetic construct
  misc_feature 1..20: note = Description of Artificial Sequence: Synthetic oligonucleotide
  misc_feature 1..20: note = Target: SCN10A; (+) strand; PAM type: YTN; PAM sequence: TTA
  source 1..20: mol_type = other DNA
tttactcatcaaatctcaag

SEQ ID NO: 74332 - DNA, 20 bp, synthetic construct
  misc_feature 1..20: note = Description of Artificial Sequence: Synthetic oligonucleotide
  misc_feature 1..20: note = Target: SCN10A; (+) strand; PAM type: YTN; PAM sequence: TTT
  source 1..20: mol_type = other DNA
actcatcaaatctcaagatg

SEQ ID NO: 74333 - DNA, 20 bp, synthetic construct
  misc_feature 1..20: note = Description of Artificial Sequence: Synthetic oligonucleotide
  misc_feature 1..20: note = Target: SCN10A; (+) strand; PAM type: YTN; PAM sequence: TTA
  source 1..20: mol_type = other DNA
ctcatcaaatctcaagatga

SEQ ID NO: 74334 - DNA, 20 bp, synthetic construct
  misc_feature 1..20: note = Description of Artificial Sequence: Synthetic oligonucleotide
  misc_feature 1..20: note = Target: SCN10A; (+) strand; PAM type: YTN; PAM sequence: CTC
  source 1..20: mol_type = other DNA
atcaaatctcaagatgaaga

SEQ ID NO: 74335 - DNA, 20 bp, synthetic construct
  misc_feature 1..20: note = Description of Artificial Sequence: Synthetic oligonucleotide
  misc_feature 1..20: note = Target: SCN10A; (+) strand; PAM type: YTN; PAM sequence: CTC
  source 1..20: mol_type = other DNA
aagatgaagagaatattcac

SEQ ID NO: 74336 - DNA, 20 bp, synthetic construct
  misc_feature 1..20: note = Description of Artificial Sequence: Synthetic oligonucleotide
  misc_feature 1..20: note = Target: SCN10A; (+) strand; PAM type: YTN; PAM sequence: TTC
  source 1..20: mol_type = other DNA
actggtcacttggttctttt

SEQ ID NO: 74337 - DNA, 20 bp, synthetic construct
  misc_feature 1..20: note = Description of Artificial Sequence: Synthetic oligonucleotide
  misc_feature 1..20: note = Target: SCN10A; (+) strand; PAM type: YTN; PAM sequence: CTG
  source 1..20: mol_type = other DNA
gtcacttggttctttttagg

SEQ ID NO: 74338 - DNA, 20 bp, synthetic construct
  misc_feature 1..20: note = Description of Artificial Sequence: Synthetic oligonucleotide
  misc_feature 1..20: note = Target: SCN10A; (+) strand; PAM type: YTN; PAM sequence: CTT
  source 1..20: mol_type = other DNA
ggttctttttaggggatttt

SEQ ID NO: 74339 - DNA, 20 bp, synthetic construct
  misc_feature 1..20: note = Description of Artificial Sequence: Synthetic oligonucleotide
  misc_feature 1..20: note = Target: SCN10A; (+) strand; PAM type: YTN; PAM sequence: TTG
  source 1..20: mol_type = other DNA
gttctttttaggggatttta

SEQ ID NO: 74340 - DNA, 20 bp, synthetic construct
  misc_feature 1..20: note = Description of Artificial Sequence: Synthetic oligonucleotide
  misc_feature 1..20: note = Target: SCN10A; (+) strand; PAM type: YTN; PAM sequence: TTC
  source 1..20: mol_type = other DNA
tttttaggggattttatttc

SEQ ID NO: 74341 - DNA, 20 bp, synthetic construct
  misc_feature 1..20: note = Description of Artificial Sequence: Synthetic oligonucleotide
  misc_feature 1..20: note = Target: SCN10A; (+) strand; PAM type: YTN; PAM sequence: CTT
  source 1..20: mol_type = other DNA
tttaggggattttatttcta

SEQ ID NO: 74342 - DNA, 20 bp, synthetic construct
  misc_feature 1..20: note = Description of Artificial Sequence: Synthetic oligonucleotide
  misc_feature 1..20: note = Target: SCN10A; (+) strand; PAM type: YTN; PAM sequence: TTT
  source 1..20: mol_type = other DNA
ttaggggattttatttctaa

SEQ ID NO: 74343 - DNA, 20 bp, synthetic construct
  misc_feature 1..20: note = Description of Artificial Sequence: Synthetic oligonucleotide
  misc_feature 1..20: note = Target: SCN10A; (+) strand; PAM type: YTN; PAM sequence: TTT
  source 1..20: mol_type = other DNA
taggggattttatttctaat

SEQ ID NO: 74344 - DNA, 20 bp, synthetic construct
  misc_feature 1..20: note = Description of Artificial Sequence: Synthetic oligonucleotide
  misc_feature 1..20: note = Target: SCN10A; (+) strand; PAM type: YTN; PAM sequence: TTT
  source 1..20: mol_type = other DNA
aggggattttatttctaatt

SEQ ID NO: 74345 - DNA, 20 bp, synthetic construct
  misc_feature 1..20: note = Description of Artificial Sequence: Synthetic oligonucleotide
  misc_feature 1..20: note = Target: SCN10A; (+) strand; PAM type: YTN; PAM sequence: TTA
  source 1..20: mol_type = other DNA
ggggattttatttctaatta

SEQ ID NO: 74346 - DNA, 20 bp, synthetic construct
  misc_feature 1..20: note = Description of Artificial Sequence: Synthetic oligonucleotide
  misc_feature 1..20: note = Target: SCN10A; (+) strand; PAM type: YTN; PAM sequence: TTT
  source 1..20: mol_type = other DNA
tatttctaattagctgtttc

SEQ ID NO: 74347 - DNA, 20 bp, synthetic construct
  misc_feature 1..20: note = Description of Artificial Sequence: Synthetic oligonucleotide
  misc_feature 1..20: note = Target: SCN10A; (+) strand; PAM type: YTN; PAM sequence: TTT
  source 1..20: mol_type = other DNA
atttctaattagctgtttct

SEQ ID NO: 74348 - DNA, 20 bp, synthetic construct
  misc_feature 1..20: note = Description of Artificial Sequence: Synthetic oligonucleotide
  misc_feature 1..20: note = Target: SCN10A; (+) strand; PAM type: YTN; PAM sequence: TTA
  source 1..20: mol_type = other DNA
tttctaattagctgtttctt

SEQ ID NO: 74349 - DNA, 20 bp, synthetic construct
  misc_feature 1..20: note = Description of Artificial Sequence: Synthetic oligonucleotide
  misc_feature 1..20: note = Target: SCN10A; (+) strand; PAM type: YTN; PAM sequence: TTT
  source 1..20: mol_type = other DNA
ctaattagctgtttcttact

SEQ ID NO: 74350 - DNA, 20 bp, synthetic construct
  misc_feature 1..20: note = Description of Artificial Sequence: Synthetic oligonucleotide
  misc_feature 1..20: note = Target: SCN10A; (+) strand; PAM type: YTN; PAM sequence: TTC
  source 1..20: mol_type = other DNA
taattagctgtttcttactt

SEQ ID NO: 74351 - DNA, 20 bp, synthetic construct
  misc_feature 1..20: note = Description of Artificial Sequence: Synthetic oligonucleotide
  misc_feature 1..20: note = Target: SCN10A; (+) strand; PAM type: YTN; PAM sequence: CTA
  source 1..20: mol_type = other DNA
attagctgtttcttacttat

SEQ ID NO: 74352 - DNA, 20 bp, synthetic construct
  misc_feature 1..20: note = Description of Artificial Sequence: Synthetic oligonucleotide
  misc_feature 1..20: note = Target: SCN10A; (+) strand; PAM type: YTN; PAM sequence: TTA
  source 1..20: mol_type = other DNA
gctgtttcttacttatccag

SEQ ID NO: 74353 - DNA, 20 bp, synthetic construct
  misc_feature 1..20: note = Description of Artificial Sequence: Synthetic oligonucleotide
  misc_feature 1..20: note = Target: SCN10A; (+) strand; PAM type: YTN; PAM sequence: CTG
  source 1..20: mol_type = other DNA
tttcttacttatccagatgt

SEQ ID NO: 74354 - DNA, 20 bp, synthetic construct
  misc_feature 1..20: note = Description of Artificial Sequence: Synthetic oligonucleotide
  misc_feature 1..20: note = Target: SCN10A; (+) strand; PAM type: YTN; PAM sequence: TTT
  source 1..20: mol_type = other DNA
cttacttatccagatgtaat

SEQ ID NO: 74355 - DNA, 20 bp, synthetic construct
  misc_feature 1..20: note = Description of Artificial Sequence: Synthetic oligonucleotide
  misc_feature 1..20: note = Target: SCN10A; (+) strand; PAM type: YTN; PAM sequence: TTC
  source 1..20: mol_type = other DNA
ttacttatccagatgtaatt

SEQ ID NO: 74356 - DNA, 20 bp, synthetic construct
  misc_feature 1..20: note = Description of Artificial Sequence: Synthetic oligonucleotide
  misc_feature 1..20: note = Target: SCN10A; (+) strand; PAM type: YTN; PAM sequence: CTT
  source 1..20: mol_type = other DNA
acttatccagatgtaattca

SEQ ID NO: 74357 - DNA, 20 bp, synthetic construct
  misc_feature 1..20: note = Description of Artificial Sequence: Synthetic oligonucleotide
  misc_feature 1..20: note = Target: SCN10A; (+) strand; PAM type: YTN; PAM sequence: TTA
  source 1..20: mol_type = other DNA
cttatccagatgtaattcaa

SEQ ID NO: 74358 - DNA, 20 bp, synthetic construct
  misc_feature 1..20: note = Description of Artificial Sequence: Synthetic oligonucleotide
  misc_feature 1..20: note = Target: SCN10A; (+) strand; PAM type: YTN; PAM sequence: CTT
  source 1..20: mol_type = other DNA
atccagatgtaattcaacca

SEQ ID NO: 74359 - DNA, 20 bp, synthetic construct
  misc_feature 1..20: note = Description of Artificial Sequence: Synthetic oligonucleotide
  misc_feature 1..20: note = Target: SCN10A; (+) strand; PAM type: YTN; PAM sequence: TTA
  source 1..20: mol_type = other DNA
tccagatgtaattcaaccag

SEQ ID NO: 74360 - DNA, 20 bp, synthetic construct
  misc_feature 1..20: note = Description of Artificial Sequence: Synthetic oligonucleotide
  misc_feature 1..20: note = Target: SCN10A; (+) strand; PAM type: YTN; PAM sequence: TTC
  source 1..20: mol_type = other DNA
aaccagaatccataaagagg

SEQ ID NO: 74361 - DNA, 20 bp, synthetic construct
  misc_feature 1..20: note = Description of Artificial Sequence: Synthetic oligonucleotide
  misc_feature 1..20: note = Target: SCN10A; (+) strand; PAM type: YTN; PAM sequence: TTT
  source 1..20: mol_type = other DNA
gtatgtttgtgatttctctt

SEQ ID NO: 74362 - DNA, 20 bp, synthetic construct
  misc_feature 1..20: note = Description of Artificial Sequence: Synthetic oligonucleotide
  misc_feature 1..20: note = Target: SCN10A; (+) strand; PAM type: YTN; PAM sequence: TTG
  source 1..20: mol_type = other DNA
tatgtttgtgatttctcttt

SEQ ID NO: 74363 - DNA, 20 bp, synthetic construct
  misc_feature 1..20: note = Description of Artificial Sequence: Synthetic oligonucleotide
  misc_feature 1..20: note = Target: SCN10A; (+) strand; PAM type: YTN; PAM sequence: TTT
  source 1..20: mol_type = other DNA
gtgatttctctttatttgta

SEQ ID NO: 74364 - DNA, 20 bp, synthetic construct
  misc_feature 1..20: note = Description of Artificial Sequence: Synthetic oligonucleotide
  misc_feature 1..20: note = Target: SCN10A; (+) strand; PAM type: YTN; PAM sequence: TTG
  source 1..20: mol_type = other DNA
tgatttctctttatttgtaa

SEQ ID NO: 74365 - DNA, 20 bp, synthetic construct
  misc_feature 1..20: note = Description of Artificial Sequence: Synthetic oligonucleotide
  misc_feature 1..20: note = Target: SCN10A; (+) strand; PAM type: YTN; PAM sequence: TTT
  source 1..20: mol_type = other DNA
ctctttatttgtaatttcca

SEQ ID NO: 74366 - DNA, 20 bp, synthetic construct
  misc_feature 1..20: note = Description of Artificial Sequence: Synthetic oligonucleotide
  misc_feature 1..20: note = Target: SCN10A; (+) strand; PAM type: YTN; PAM sequence: TTC
  source 1..20: mol_type = other DNA
tctttatttgtaatttccat

SEQ ID NO: 74367 - DNA, 20 bp, synthetic construct
  misc_feature 1..20: note = Description of Artificial Sequence: Synthetic oligonucleotide
  misc_feature 1..20: note = Target: SCN10A; (+) strand; PAM type: YTN; PAM sequence: CTC
  source 1..20: mol_type = other DNA
tttatttgtaatttccatgt

SEQ ID NO: 74368 - DNA, 20 bp, synthetic construct
  misc_feature 1..20: note = Description of Artificial Sequence: Synthetic oligonucleotide
  misc_feature 1..20: note = Target: SCN10A; (+) strand; PAM type: YTN; PAM sequence: CTT
  source 1..20: mol_type = other DNA
tatttgtaatttccatgtaa

SEQ ID NO: 74369 - DNA, 20 bp, synthetic construct
  misc_feature 1..20: note = Description of Artificial Sequence: Synthetic oligonucleotide
  misc_feature 1..20: note = Target: SCN10A; (+) strand; PAM type: YTN; PAM sequence: TTT
  source 1..20: mol_type = other DNA
atttgtaatttccatgtaat

SEQ ID NO: 74370 - DNA, 20 bp, synthetic construct
  misc_feature 1..20: note = Description of Artificial Sequence: Synthetic oligonucleotide
  misc_feature 1..20: note = Target: SCN10A; (+) strand; PAM type: YTN; PAM sequence: TTA
  source 1..20: mol_type = other DNA
tttgtaatttccatgtaatt

SEQ ID NO: 74371 - DNA, 20 bp, synthetic construct
  misc_feature 1..20: note = Description of Artificial Sequence: Synthetic oligonucleotide
  misc_feature 1..20: note = Target: SCN10A; (+) strand; PAM type: YTN; PAM sequence: TTT
  source 1..20: mol_type = other DNA
gtaatttccatgtaattgta

SEQ ID NO: 74372 - DNA, 20 bp, synthetic construct
  misc_feature 1..20: note = Description of Artificial Sequence: Synthetic oligonucleotide
  misc_feature 1..20: note = Target: SCN10A; (+) strand; PAM type: YTN; PAM sequence: TTG
  source 1..20: mol_type = other DNA
taatttccatgtaattgtat

SEQ ID NO: 74373 - DNA, 20 bp, synthetic construct
  misc_feature 1..20: note = Description of Artificial Sequence: Synthetic oligonucleotide
  misc_feature 1..20: note = Target: SCN10A; (+) strand; PAM type: YTN; PAM sequence: TTT
  source 1..20: mol_type = other DNA
ccatgtaattgtatatattt

SEQ ID NO: 74374 - DNA, 20 bp, synthetic construct
  misc_feature 1..20: note = Description of Artificial Sequence: Synthetic oligonucleotide
  misc_feature 1..20: note = Target: SCN10A; (+) strand; PAM type: YTN; PAM sequence: TTC
  source 1..20: mol_type = other DNA
catgtaattgtatatatttt

SEQ ID NO: 74375 - DNA, 20 bp, synthetic construct
  misc_feature 1..20: note = Description of Artificial Sequence: Synthetic oligonucleotide
  misc_feature 1..20: note = Target: SCN10A; (+) strand; PAM type: YTN; PAM sequence: TTG
  source 1..20: mol_type = other DNA
tatatattttgaaaaagcaa

SEQ ID NO: 74376 - DNA, 20 bp, synthetic construct
  misc_feature 1..20: note = Description of Artificial Sequence: Synthetic oligonucleotide
  misc_feature 1..20: note = Target: SCN10A; (+) strand; PAM type: YTN; PAM sequence: TTT
  source 1..20: mol_type = other DNA
tgaaaaagcaacaactaccc

SEQ ID NO: 74377 - DNA, 20 bp, synthetic construct
  misc_feature 1..20: note = Description of Artificial Sequence: Synthetic oligonucleotide
  misc_feature 1..20: note = Target: SCN10A; (+) strand; PAM type: YTN; PAM sequence: TTT
  source 1..20: mol_type = other DNA
gaaaaagcaacaactaccca

SEQ ID NO: 74378 - DNA, 20 bp, synthetic construct
  misc_feature 1..20: note = Description of Artificial Sequence: Synthetic oligonucleotide
  misc_feature 1..20: note = Target: SCN10A; (+) strand; PAM type: YTN; PAM sequence: TTG
  source 1..20: mol_type = other DNA
aaaaagcaacaactacccaa

SEQ ID NO: 74379 - DNA, 20 bp, synthetic construct
  misc_feature 1..20: note = Description of Artificial Sequence: Synthetic oligonucleotide
  misc_feature 1..20: note = Target: SCN10A; (+) strand; PAM type: YTN; PAM sequence: CTA
  source 1..20: mol_type = other DNA
cccaagcagagacgacacat

SEQ ID NO: 74380 - DNA, 20 bp, synthetic construct
  misc_feature 1..20: note = Description of Artificial Sequence: Synthetic oligonucleotide
  misc_feature 1..20: note = Target: SCN10A; (+) strand; PAM type: YTN; PAM sequence: TTG
  source 1..20: mol_type = other DNA
agagaataattaccctgatt

SEQ ID NO: 74381 - DNA, 20 bp, synthetic construct
  misc_feature 1..20: note = Description of Artificial Sequence: Synthetic oligonucleotide
  misc_feature 1..20: note = Target: SCN10A; (+) strand; PAM type: YTN; PAM sequence: TTA
  source 1..20: mol_type = other DNA
ccctgattactttccaccct

SEQ ID NO: 74382 - DNA, 20 bp, synthetic construct
  misc_feature 1..20: note = Description of Artificial Sequence: Synthetic oligonucleotide
  misc_feature 1..20: note = Target: SCN10A; (+) strand; PAM type: YTN; PAM sequence: CTG
  source 1..20: mol_type = other DNA
attactttccaccctacttc

SEQ ID NO: 74383 - DNA, 20 bp, synthetic construct
  misc_feature 1..20: note = Description of Artificial Sequence: Synthetic oligonucleotide
  misc_feature 1..20: note = Target: SCN10A; (+) strand; PAM type: YTN; PAM sequence: TTA
  source 1..20: mol_type = other DNA
ctttccaccctacttcctca

SEQ ID NO: 74384 - DNA, 20 bp, synthetic construct
  misc_feature 1..20: note = Description of Artificial Sequence: Synthetic oligonucleotide
  misc_feature 1..20: note = Target: SCN10A; (+) strand; PAM type: YTN; PAM sequence: CTT
  source 1..20: mol_type = other DNA
tccaccctacttcctcactg

SEQ ID NO: 74385 - DNA, 20 bp, synthetic construct
  misc_feature 1..20: note = Description of Artificial Sequence: Synthetic oligonucleotide
  misc_feature 1..20: note = Target: SCN10A; (+) strand; PAM type: YTN; PAM sequence: TTT
  source 1..20: mol_type = other DNA
ccaccctacttcctcactgt

SEQ ID NO: 74386 - DNA, 20 bp, synthetic construct
  misc_feature 1..20: note = Description of Artificial Sequence: Synthetic oligonucleotide
  misc_feature 1..20: note = Target: SCN10A; (+) strand; PAM type: YTN; PAM sequence: TTC
  source 1..20: mol_type = other DNA
caccctacttcctcactgta

SEQ ID NO: 74387 - DNA, 20 bp, synthetic construct
  misc_feature 1..20: note = Description of Artificial Sequence: Synthetic oligonucleotide
  misc_feature 1..20: note = Target: SCN10A; (+) strand; PAM type: YTN; PAM sequence: CTA
  source 1..20: mol_type = other DNA
cttcctcactgtagatactg

SEQ ID NO: 74388 - DNA, 20 bp, synthetic construct
  misc_feature 1..20: note = Description of Artificial Sequence: Synthetic oligonucleotide
  misc_feature 1..20: note = Target: SCN10A; (+) strand; PAM type: YTN; PAM sequence: CTT
  source 1..20: mol_type = other DNA
cctcactgtagatactgctc

SEQ ID NO: 74389 - DNA, 20 bp, synthetic construct
  misc_feature 1..20: note = Description of Artificial Sequence: Synthetic oligonucleotide
  misc_feature 1..20: note = Target: SCN10A; (+) strand; PAM type: YTN; PAM sequence: TTC
  source 1..20: mol_type = other DNA
ctcactgtagatactgctct

SEQ ID NO: 74390 - DNA, 20 bp, synthetic construct
  misc_feature 1..20: note = Description of Artificial Sequence: Synthetic oligonucleotide
  misc_feature 1..20: note = Target: SCN10A; (+) strand; PAM type: YTN; PAM sequence: CTC
  source 1..20: mol_type = other DNA
actgtagatactgctctacg

SEQ ID NO: 74391 - DNA, 20 bp, synthetic construct
  misc_feature 1..20: note = Description of Artificial Sequence: Synthetic oligonucleotide
  misc_feature 1..20: note = Target: SCN10A; (+) strand; PAM type: YTN; PAM sequence: CTG
  source 1..20: mol_type = other DNA
tagatactgctctacgcagg

SEQ ID NO: 74392 - DNA, 20 bp, synthetic construct
  misc_feature 1..20: note = Description of Artificial Sequence: Synthetic oligonucleotide
  misc_feature 1..20: note = Target: SCN10A; (+) strand; PAM type: YTN; PAM sequence: CTG
  source 1..20: mol_type = other DNA
ctctacgcaggatgcaggct

SEQ ID NO: 74393 - DNA, 20 bp, synthetic construct
  misc_feature 1..20: note = Description of Artificial Sequence: Synthetic oligonucleotide
  misc_feature 1..20: note = Target: SCN10A; (+) strand; PAM type: YTN; PAM sequence: CTC
  source 1..20: mol_type = other DNA
tacgcaggatgcaggctgga

SEQ ID NO: 74394 - DNA, 20 bp, synthetic construct
  misc_feature 1..20: note = Description of Artificial Sequence: Synthetic oligonucleotide
  misc_feature 1..20: note = Target: SCN10A; (+) strand; PAM type: YTN; PAM sequence: CTA
  source 1..20: mol_type = other DNA
cgcaggatgcaggctggact

SEQ ID NO: 74395 - DNA, 20 bp, synthetic construct
  misc_feature 1..20: note = Description of Artificial Sequence: Synthetic oligonucleotide
  misc_feature 1..20: note = Target: SCN10A; (+) strand; PAM type: YTN; PAM sequence: CTG
  source 1..20: mol_type = other DNA
gacttcttaactagctacat

SEQ ID NO: 74396 - DNA, 20 bp, synthetic construct
  misc_feature 1..20: note = Description of Artificial Sequence: Synthetic oligonucleotide
  misc_feature 1..20: note = Target: SCN10A; (+) strand; PAM type: YTN; PAM sequence: CTT
  source 1..20: mol_type = other DNA
cttaactagctacatggtct

SEQ ID NO: 74397 - DNA, 20 bp, synthetic construct
  misc_feature 1..20: note = Description of Artificial Sequence: Synthetic oligonucleotide
  misc_feature 1..20: note = Target: SCN10A; (+) strand; PAM type: YTN; PAM sequence: TTC
  source 1..20: mol_type = other DNA
ttaactagctacatggtctt

SEQ ID NO: 74398 - DNA, 20 bp, synthetic construct
  misc_feature 1..20: note = Description of Artificial Sequence: Synthetic oligonucleotide
  misc_feature 1..20: note = Target: SCN10A; (+) strand; PAM type: YTN; PAM sequence: CTT
  source 1..20: mol_type = other DNA
aactagctacatggtcttgg

SEQ ID NO: 74399 - DNA, 20 bp, synthetic construct
  misc_feature 1..20: note = Description of Artificial Sequence: Synthetic oligonucleotide
  misc_feature 1..20: note = Target: SCN10A; (+) strand; PAM type: YTN; PAM sequence: TTA
  source 1..20: mol_type = other DNA
actagctacatggtcttgga

SEQ ID NO: 74400 - DNA, 20 bp, synthetic construct
  misc_feature 1..20: note = Description of Artificial Sequence: Synthetic oligonucleotide
  misc_feature 1..20: note = Target: SCN10A; (+) strand; PAM type: YTN; PAM sequence: CTA
  source 1..20: mol_type = other DNA
gctacatggtcttggataat

SEQ ID NO: 74401 - DNA, 20 bp, synthetic construct
  misc_feature 1..20: note = Description of Artificial Sequence: Synthetic oligonucleotide
  misc_feature 1..20: note = Target: SCN10A; (+) strand; PAM type: YTN; PAM sequence: CTA
  source 1..20: mol_type = other DNA
catggtcttggataatttac

SEQ ID NO: 74402 - DNA, 20 bp, synthetic construct
  misc_feature 1..20: note = Description of Artificial Sequence: Synthetic oligonucleotide
  misc_feature 1..20: note = Target: SCN10A; (+) strand; PAM type: YTN; PAM sequence: CTT
  source 1..20: mol_type = other DNA
ggataatttacttaatgcct

SEQ ID NO: 74403 - DNA, 20 bp, synthetic construct
  misc_feature 1..20: note = Description of Artificial Sequence: Synthetic oligonucleotide
  misc_feature 1..20: note = Target: SCN10A; (+) strand; PAM type: YTN; PAM sequence: TTG
  source 1..20: mol_type = other DNA
gataatttacttaatgcctc

SEQ ID NO: 74404 - DNA, 20 bp, synthetic construct
  misc_feature 1..20: note = Description of Artificial Sequence: Synthetic oligonucleotide
  misc_feature 1..20: note = Target: SCN10A; (+) strand; PAM type: YTN; PAM sequence: TTT
  source 1..20: mol_type = other DNA
acttaatgcctctgtgtgtc

SEQ ID NO: 74405 - DNA, 20 bp, synthetic construct
  misc_feature 1..20: note = Description of Artificial Sequence: Synthetic oligonucleotide
  misc_feature 1..20: note = Target: SCN10A; (+) strand; PAM type: YTN; PAM sequence: TTA
  source 1..20: mol_type = other DNA
cttaatgcctctgtgtgtca

SEQ ID NO: 74406 - DNA, 20 bp, synthetic construct
  misc_feature 1..20: note = Description of Artificial Sequence: Synthetic oligonucleotide
  misc_feature 1..20: note = Target: SCN10A; (+) strand; PAM type: YTN; PAM sequence: CTT
  source 1..20: mol_type = other DNA
aatgcctctgtgtgtcagtt

SEQ ID NO: 74407 - DNA, 20 bp, synthetic construct
  misc_feature 1..20: note = Description of Artificial Sequence: Synthetic oligonucleotide
  misc_feature 1..20: note = Target: SCN10A; (+) strand; PAM type: YTN; PAM sequence: TTA
  source 1..20: mol_type = other DNA
atgcctctgtgtgtcagttt

SEQ ID NO: 74408 - DNA, 20 bp, synthetic construct
  misc_feature 1..20: note = Description of Artificial Sequence: Synthetic oligonucleotide
  misc_feature 1..20: note = Target: SCN10A; (+) strand; PAM type: YTN; PAM sequence: CTC
  source 1..20: mol_type = other DNA
tgtgtgtcagtttcattatc

SEQ ID NO: 74409 - DNA, 20 bp, synthetic construct
  misc_feature 1..20: note = Description of Artificial Sequence: Synthetic oligonucleotide
  misc_feature 1..20: note = Target: SCN10A; (+) strand; PAM type: YTN; PAM sequence: CTG
  source 1..20: mol_type = other DNA
tgtgtcagtttcattatctg

SEQ ID NO: 74410 - DNA, 20 bp, synthetic construct
  misc_feature 1..20: note = Description of Artificial Sequence: Synthetic oligonucleotide
  misc_feature 1..20: note = Target: SCN10A; (+) strand; PAM type: YTN; PAM sequence: TTT
  source 1..20: mol_type = other DNA
cattatctgtaaaatgggga

SEQ ID NO: 74411 - DNA, 20 bp, synthetic construct
  misc_feature 1..20: note = Description of Artificial Sequence: Synthetic oligonucleotide
  misc_feature 1..20: note = Target: SCN10A; (+) strand; PAM type: YTN; PAM sequence: TTC
  source 1..20: mol_type = other DNA
attatctgtaaaatggggat

SEQ ID NO: 74412 - DNA, 20 bp, synthetic construct
  misc_feature 1..20: note = Description of Artificial Sequence: Synthetic oligonucleotide
  misc_feature 1..20: note = Target: SCN10A; (+) strand; PAM type: YTN; PAM sequence: TTA
  source 1..20: mol_type = other DNA
tctgtaaaatggggatggta

SEQ ID NO: 74413 - DNA, 20 bp, synthetic construct
  misc_feature 1..20: note = Description of Artificial Sequence: Synthetic oligonucleotide
  misc_feature 1..20: note = Target: SCN10A; (+) strand; PAM type: YTN; PAM sequence: CTG
  source 1..20: mol_type = other DNA
taaaatggggatggtaatct

SEQ ID NO: 74414 - DNA, 20 bp, synthetic construct
  misc_feature 1..20: note = Description of Artificial Sequence: Synthetic oligonucleotide
  misc_feature 1..20: note = Target: SCN10A; (+) strand; PAM type: YTN; PAM sequence: CTC
  source 1..20: mol_type = other DNA
tacttcagaggcttttgaac

SEQ ID NO: 74415 - DNA, 20 bp, synthetic construct
  misc_feature 1..20: note = Description of Artificial Sequence: Synthetic oligonucleotide
  misc_feature 1..20: note = Target: SCN10A; (+) strand; PAM type: YTN; PAM sequence: CTA
  source 1..20: mol_type = other DNA
cttcagaggcttttgaactg

SEQ ID NO: 74416 - DNA, 20 bp, synthetic construct
  misc_feature 1..20: note = Description of Artificial Sequence: Synthetic oligonucleotide
  misc_feature 1..20: note = Target: SCN10A; (+) strand; PAM type: YTN; PAM sequence: CTT
  source 1..20: mol_type = other DNA
cagaggcttttgaactgatg

SEQ ID NO: 74417 - DNA, 20 bp, synthetic construct
  misc_feature 1..20: note = Description of Artificial Sequence: Synthetic oligonucleotide
  misc_feature 1..20: note = Target: SCN10A; (+) strand; PAM type: YTN; PAM sequence: TTC
  source 1..20: mol_type = other DNA
agaggcttttgaactgatga

SEQ ID NO: 74418 - DNA, 20 bp, synthetic construct
  misc_feature 1..20: note = Description of Artificial Sequence: Synthetic oligonucleotide
  misc_feature 1..20: note = Target: SCN10A; (+) strand; PAM type: YTN; PAM sequence: CTT
  source 1..20: mol_type = other DNA
ttgaactgatgatggtattg

SEQ ID NO: 74419 - DNA, 20 bp, synthetic construct
  misc_feature 1..20: note = Description of Artificial Sequence: Synthetic oligonucleotide
  misc_feature 1..20: note = Target: SCN10A; (+) strand; PAM type: YTN; PAM sequence: TTT
  source 1..20: mol_type = other DNA
tgaactgatgatggtattga

SEQ ID NO: 74420 - DNA, 20 bp, synthetic construct
  misc_feature 1..20: note = Description of Artificial Sequence: Synthetic oligonucleotide
  misc_feature 1..20: note = Target: SCN10A; (+) strand; PAM type: YTN; PAM sequence: TTT
  source 1..20: mol_type = other DNA
gaactgatgatggtattgac

SEQ ID NO: 74421 - DNA, 20 bp, synthetic construct
  misc_feature 1..20: note = Description of Artificial Sequence: Synthetic oligonucleotide
  misc_feature 1..20: note = Target: SCN10A; (+) strand; PAM type: YTN; PAM sequence: TTG
  source 1..20: mol_type = other DNA
aactgatgatggtattgaca

SEQ ID NO: 74422 - DNA, 20 bp, synthetic construct
  misc_feature 1..20: note = Description of Artificial Sequence: Synthetic oligonucleotide
  misc_feature 1..20: note = Target: SCN10A; (+) strand; PAM type: YTN; PAM sequence: CTG
  source 1..20: mol_type = other DNA
atgatggtattgacacttag

SEQ ID NO: 74423 - DNA, 20 bp, synthetic construct
  misc_feature 1..20: note = Description of Artificial Sequence: Synthetic oligonucleotide
  misc_feature 1..20: note = Target: SCN10A; (+) strand; PAM type: YTN; PAM sequence: TTG
  source 1..20: mol_type = other DNA
acacttaggaagtatttagc

SEQ ID NO: 74424 - DNA, 20 bp, synthetic construct
  misc_feature 1..20: note = Description of Artificial Sequence: Synthetic oligonucleotide
  misc_feature 1..20: note = Target: SCN10A; (+) strand; PAM type: YTN; PAM sequence: CTT
  source 1..20: mol_type = other DNA
aggaagtatttagcaagtga

SEQ ID NO: 74425 - DNA, 20 bp, synthetic construct
  misc_feature 1..20: note = Description of Artificial Sequence: Synthetic oligonucleotide
  misc_feature 1..20: note = Target: SCN10A; (+) strand; PAM type: YTN; PAM sequence: TTA
  source 1..20: mol_type = other DNA
ggaagtatttagcaagtgag

SEQ ID NO: 74426 - DNA, 20 bp, synthetic construct
  misc_feature 1..20: note = Description of Artificial Sequence: Synthetic oligonucleotide
  misc_feature 1..20: note = Target: SCN10A; (+) strand; PAM type: YTN; PAM sequence: TTT
  source 1..20: mol_type = other DNA
agcaagtgagagactgtatt

SEQ ID NO: 74427 - DNA, 20 bp, synthetic construct
  misc_feature 1..20: note = Description of Artificial Sequence: Synthetic oligonucleotide
  misc_feature 1..20: note = Target: SCN10A; (+) strand; PAM type: YTN; PAM sequence: TTA
  source 1..20: mol_type = other DNA
gcaagtgagagactgtattg

SEQ ID NO: 74428 - DNA, 20 bp, synthetic construct
  misc_feature 1..20: note = Description of Artificial Sequence: Synthetic oligonucleotide
  misc_feature 1..20: note = Target: SCN10A; (+) strand; PAM type: YTN; PAM sequence: CTG
  source 1..20: mol_type = other DNA
tattgtcattaaatatcctt

SEQ ID NO: 74429 - DNA, 20 bp, synthetic construct
  misc_feature 1..20: note = Description of Artificial Sequence: Synthetic oligonucleotide
  misc_feature 1..20: note = Target: SCN10A; (+) strand; PAM type: YTN; PAM sequence: TTG
  source 1..20: mol_type = other DNA
tcattaaatatccttctgta

SEQ ID NO: 74430 - DNA, 20 bp, synthetic construct
  misc_feature 1..20: note = Description of Artificial Sequence: Synthetic oligonucleotide
  misc_feature 1..20: note = Target: SCN10A; (+) strand; PAM type: YTN; PAM sequence: TTA
  source 1..20: mol_type = other DNA
aatatccttctgtagaatct

SEQ ID NO: 74431 - DNA, 20 bp, synthetic construct
  misc_feature 1..20: note = Description of Artificial Sequence: Synthetic oligonucleotide
  misc_feature 1..20: note = Target: SCN10A; (+) strand; PAM type: YTN; PAM sequence: CTT
  source 1..20: mol_type = other DNA
ctgtagaatctgaaaattca

SEQ ID NO: 74432 - DNA, 20 bp, synthetic construct
  misc_feature 1..20: note = Description of Artificial Sequence: Synthetic oligonucleotide
  misc_feature 1..20: note = Target: SCN10A; (+) strand; PAM type: YTN; PAM sequence: TTC
  source 1..20: mol_type = other DNA
tgtagaatctgaaaattcaa

SEQ ID NO: 74433 - DNA, 20 bp, synthetic construct
  misc_feature 1..20: note = Description of Artificial Sequence: Synthetic oligonucleotide
  misc_feature 1..20: note = Target: SCN10A; (+) strand; PAM type: YTN; PAM sequence: CTG
  source 1..20: mol_type = other DNA
tagaatctgaaaattcaaga

SEQ ID NO: 74434 - DNA, 20 bp, synthetic construct
  misc_feature 1..20: note = Description of Artificial Sequence: Synthetic oligonucleotide
  misc_feature 1..20: note = Target: SCN10A; (+) strand; PAM type: YTN; PAM sequence: CTG
  source 1..20: mol_type = other DNA
aaaattcaagattcagctca

SEQ ID NO: 74435 - DNA, 20 bp, synthetic construct
  misc_feature 1..20: note = Description of Artificial Sequence: Synthetic oligonucleotide
  misc_feature 1..20: note = Target: SCN10A; (+) strand; PAM type: YTN; PAM sequence: TTC
  source 1..20: mol_type = other DNA
aagattcagctcagaaaacg

SEQ ID NO: 74436 - DNA, 20 bp, synthetic construct
  misc_feature 1..20: note = Description of Artificial Sequence: Synthetic oligonucleotide
  misc_feature 1..20: note = Target: SCN10A; (+) strand; PAM type: YTN; PAM sequence: TTC
  source 1..20: mol_type = other DNA
agctcagaaaacgtaattct

SEQ ID NO: 74437 - DNA, 20 bp, synthetic construct
  misc_feature 1..20: note = Description of Artificial Sequence: Synthetic oligonucleotide
  misc_feature 1..20: note = Target: SCN10A; (+) strand; PAM type: YTN; PAM sequence: CTC
  source 1..20: mol_type = other DNA
agaaaacgtaattcttgctg

SEQ ID NO: 74438 - DNA, 20 bp, synthetic construct
  misc_feature 1..20: note = Description of Artificial Sequence: Synthetic oligonucleotide
  misc_feature 1..20: note = Target: SCN10A; (+) strand; PAM type: YTN; PAM sequence: TTC
  source 1..20: mol_type = other DNA
ttgctggccagccagaaaga

SEQ ID NO: 74439 - DNA, 20 bp, synthetic construct
  misc_feature 1..20: note = Description of Artificial Sequence: Synthetic oligonucleotide
  misc_feature 1..20: note = Target: SCN10A; (+) strand; PAM type: YTN; PAM sequence: CTT
  source 1..20: mol_type = other DNA
gctggccagccagaaagaaa

SEQ ID NO: 74440 - DNA, 20 bp, synthetic construct
  misc_feature 1..20: note = Description of Artificial Sequence: Synthetic oligonucleotide
  misc_feature 1..20: note = Target: SCN10A; (+) strand; PAM type: YTN; PAM sequence: TTG
  source 1..20: mol_type = other DNA
ctggccagccagaaagaaaa

SEQ ID NO: 74441 - DNA, 20 bp, synthetic construct
  misc_feature 1..20: note = Description of Artificial Sequence: Synthetic oligonucleotide
  misc_feature 1..20: note = Target: SCN10A; (+) strand; PAM type: YTN; PAM sequence: CTG
  source 1..20: mol_type = other DNA
gccagccagaaagaaaaaaa

SEQ ID NO: 74442 - DNA, 20 bp, synthetic construct
  misc_feature 1..20: note = Description of Artificial Sequence: Synthetic oligonucleotide
  misc_feature 1..20: note = Target: SCN10A; (+) strand; PAM type: YTN; PAM sequence: CTT
  source 1..20: mol_type = other DNA
catcaagctgtgcagcttca

SEQ ID NO: 74443 - DNA, 20 bp, synthetic construct
  misc_feature 1..20: note = Description of Artificial Sequence: Synthetic oligonucleotide
  misc_feature 1..20: note = Target: SCN10A; (+) strand; PAM type: YTN; PAM sequence: TTC
  source 1..20: mol_type = other DNA
atcaagctgtgcagcttcat

SEQ ID NO: 74444 - DNA, 20 bp, synthetic construct
  misc_feature 1..20: note = Description of Artificial Sequence: Synthetic oligonucleotide
  misc_feature 1..20: note = Target: SCN10A; (+) strand; PAM type: YTN; PAM sequence: CTG
  source 1..20: mol_type = other DNA
tgcagcttcatgttgagtgt

SEQ ID NO: 74445 - DNA, 20 bp, synthetic construct
  misc_feature 1..20: note = Description of Artificial Sequence: Synthetic oligonucleotide
  misc_feature 1..20: note = Target: SCN10A; (+) strand; PAM type: YTN; PAM sequence: CTT
  source 1..20: mol_type = other DNA
catgttgagtgtgcagatag

SEQ ID NO: 74446 - DNA, 20 bp, synthetic construct
  misc_feature 1..20: note = Description of Artificial Sequence: Synthetic oligonucleotide
  misc_feature 1..20: note = Target: SCN10A; (+) strand; PAM type: YTN; PAM sequence: TTC
  source 1..20: mol_type = other DNA
atgttgagtgtgcagataga

SEQ ID NO: 74447 - DNA, 20 bp, synthetic construct
  misc_feature 1..20: note = Description of Artificial Sequence: Synthetic oligonucleotide
  misc_feature 1..20: note = Target: SCN10A; (+) strand; PAM type: YTN; PAM sequence: TTG
  source 1..20: mol_type = other DNA
agtgtgcagatagatgactg

SEQ ID NO: 74448 - DNA, 20 bp, synthetic construct
  misc_feature 1..20: note = Description of Artificial Sequence: Synthetic oligonucleotide
  misc_feature 1..20: note = Target: SCN10A; (+) strand; PAM type: YTN; PAM sequence: CTG
  source 1..20: mol_type = other DNA
tgccaaggttaccagctcaa

SEQ ID NO: 74449 - DNA, 20 bp, synthetic construct
  misc_feature 1..20: note = Description of Artificial Sequence: Synthetic oligonucleotide
  misc_feature 1..20: note = Target: SCN10A; (+) strand; PAM type: YTN; PAM sequence: TTA
  source 1..20: mol_type = other DNA
ccagctcaatgacaactgtc

SEQ ID NO: 74450 - DNA, 20 bp, synthetic construct
  misc_feature 1..20: note = Description of Artificial Sequence: Synthetic oligonucleotide
  misc_feature 1..20: note = Target: SCN10A; (+) strand; PAM type: YTN; PAM sequence: CTC
  source 1..20: mol_type = other DNA
aatgacaactgtccagaaat

SEQ ID NO: 74451 - DNA, 20 bp, synthetic construct
  misc_feature 1..20: note = Description of Artificial Sequence: Synthetic oligonucleotide
  misc_feature 1..20: note = Target: SCN10A; (+) strand; PAM type: YTN; PAM sequence: CTG
  source 1..20: mol_type = other DNA
tccagaaatccaacaatctg

SEQ ID NO: 74452 - DNA, 20 bp, synthetic construct
  misc_feature 1..20: note = Description of Artificial Sequence: Synthetic oligonucleotide
  misc_feature 1..20: note = Target: SCN10A; (+) strand; PAM type: YTN; PAM sequence: CTG
  source 1..20: mol_type = other DNA
cctcagagttagggagcagg

SEQ ID NO: 74453 - DNA, 20 bp, synthetic construct
  misc_feature 1..20: note = Description of Artificial Sequence: Synthetic oligonucleotide
  misc_feature 1..20: note = Target: SCN10A; (+) strand; PAM type: YTN; PAM sequence: CTC
  source 1..20: mol_type = other DNA
agagttagggagcagggtag

SEQ ID NO: 74454 - DNA, 20 bp, synthetic construct
  misc_feature 1..20: note = Description of Artificial Sequence: Synthetic oligonucleotide
  misc_feature 1..20: note = Target: SCN10A; (+) strand; PAM type: YTN; PAM sequence: TTA
  source 1..20: mol_type = other DNA
gggagcagggtagaactctt

SEQ ID NO: 74455 - DNA, 20 bp, synthetic construct
  misc_feature 1..20: note = Description of Artificial Sequence: Synthetic oligonucleotide
  misc_feature 1..20: note = Target: SCN10A; (+) strand; PAM type: YTN; PAM sequence: CTC
  source 1..20: mol_type = other DNA
ttttttactgaagccttcta

SEQ ID NO: 74456 - DNA, 20 bp, synthetic construct
  misc_feature 1..20: note = Description of Artificial Sequence: Synthetic oligonucleotide
  misc_feature 1..20: note = Target: SCN10A; (+) strand; PAM type: YTN; PAM sequence: CTT
  source 1..20: mol_type = other DNA
ttttactgaagccttctaag

SEQ ID NO: 74457 - DNA, 20 bp, synthetic construct
  misc_feature 1..20: note = Description of Artificial Sequence: Synthetic oligonucleotide
  misc_feature 1..20: note = Target: SCN10A; (+) strand; PAM type: YTN; PAM sequence: TTT
  source 1..20: mol_type = other DNA
tttactgaagccttctaaga

SEQ ID NO: 74458 - DNA, 20 bp, synthetic construct
  misc_feature 1..20: note = Description of Artificial Sequence: Synthetic oligonucleotide
  misc_feature 1..20: note = Target: SCN10A; (+) strand; PAM type: YTN; PAM sequence: TTT
  source 1..20: mol_type = other DNA
ttactgaagccttctaagaa

SEQ ID NO: 74459 - DNA, 20 bp, synthetic construct
  misc_feature 1..20: note = Description of Artificial Sequence: Synthetic oligonucleotide
  misc_feature 1..20: note = Target: SCN10A; (+) strand; PAM type: YTN; PAM sequence: TTT
  source 1..20: mol_type = other DNA
tactgaagccttctaagaaa

SEQ ID NO: 74460 - DNA, 20 bp, synthetic construct
  misc_feature 1..20: note = Description of Artificial Sequence: Synthetic oligonucleotide
  misc_feature 1..20: note = Target: SCN10A; (+) strand; PAM type: YTN; PAM sequence: TTT
  source 1..20: mol_type = other DNA
actgaagccttctaagaaaa

SEQ ID NO: 74461 - DNA, 20 bp, synthetic construct
  misc_feature 1..20: note = Description of Artificial Sequence: Synthetic oligonucleotide
  misc_feature 1..20: note = Target: SCN10A; (+) strand; PAM type: YTN; PAM sequence: TTA
  source 1..20: mol_type = other DNA
ctgaagccttctaagaaaag

SEQ ID NO: 74462 - DNA, 20 bp, synthetic construct
  misc_feature 1..20: note = Description of Artificial Sequence: Synthetic oligonucleotide
  misc_feature 1..20: note = Target: SCN10A; (+) strand; PAM type: YTN; PAM sequence: CTG
  source 1..20: mol_type = other DNA
aagccttctaagaaaaggct

SEQ ID NO: 74463 - DNA, 20 bp, synthetic construct
  misc_feature 1..20: note = Description of Artificial Sequence: Synthetic oligonucleotide
  misc_feature 1..20: note = Target: SCN10A; (+) strand; PAM type: YTN; PAM sequence: CTT
  source 1..20: mol_type = other DNA
ctaagaaaaggctggttacc

SEQ ID NO: 74464 - DNA, 20 bp, synthetic construct
  misc_feature 1..20: note = Description of Artificial Sequence: Synthetic oligonucleotide
  misc_feature 1..20: note = Target: SCN10A; (+) strand; PAM type: YTN; PAM sequence: TTC
  source 1..20: mol_type = other DNA
taagaaaaggctggttacca

SEQ ID NO: 74465 - DNA, 20 bp, synthetic construct
  misc_feature 1..20: note = Description of Artificial Sequence: Synthetic oligonucleotide
  misc_feature 1..20: note = Target: SCN10A; (+) strand; PAM type: YTN; PAM sequence: CTA
  source 1..20: mol_type = other DNA
agaaaaggctggttaccatt

SEQ ID NO: 74466 - DNA, 20 bp, synthetic construct
  misc_feature 1..20: note = Description of Artificial Sequence: Synthetic oligonucleotide
  misc_feature 1..20: note = Target: SCN10A; (+) strand; PAM type: YTN; PAM sequence: CTG
  source 1..20: mol_type = other DNA
gttaccatttgtcaggcaac

SEQ ID NO: 74467 - DNA, 20 bp, synthetic construct
  misc_feature 1..20: note = Description of Artificial Sequence: Synthetic oligonucleotide
  misc_feature 1..20: note = Target: SCN10A; (+) strand; PAM type: YTN; PAM sequence: TTA
  source 1..20: mol_type = other DNA
ccatttgtcaggcaactgag

SEQ ID NO: 74468 - DNA, 20 bp, synthetic construct
  misc_feature 1..20: note = Description of Artificial Sequence: Synthetic oligonucleotide
  misc_feature 1..20: note = Target: SCN10A; (+) strand; PAM type: YTN; PAM sequence: TTT
  source 1..20: mol_type = other DNA
gtcaggcaactgaggcaggt

SEQ ID NO: 74469 - DNA, 20 bp, synthetic construct
  misc_feature 1..20: note = Description of Artificial Sequence: Synthetic oligonucleotide
  misc_feature 1..20: note = Target: SCN10A; (+) strand; PAM type: YTN; PAM sequence: TTG
  source 1..20: mol_type = other DNA
tcaggcaactgaggcaggtg

SEQ ID NO: 74470 - DNA, 20 bp, synthetic construct
  misc_feature 1..20: note = Description of Artificial Sequence: Synthetic oligonucleotide
  misc_feature 1..20: note = Target: SCN10A; (+) strand; PAM type: YTN; PAM sequence: CTG
  source 1..20: mol_type = other DNA
aggcaggtgtattcttgtac

SEQ ID NO: 74471 - DNA, 20 bp, synthetic construct
  misc_feature 1..20: note = Description of Artificial Sequence: Synthetic oligonucleotide
  misc_feature 1..20: note = Target: SCN10A; (+) strand; PAM type: YTN; PAM sequence: TTC
  source 1..20: mol_type = other DNA
ttgtacatcaacctcctgca

SEQ ID NO: 74472 - DNA, 20 bp, synthetic construct
  misc_feature 1..20: note = Description of Artificial Sequence: Synthetic oligonucleotide
  misc_feature 1..20: note = Target: SCN10A; (+) strand; PAM type: YTN; PAM sequence: CTT
  source 1..20: mol_type = other DNA
gtacatcaacctcctgcaag

SEQ ID NO: 74473 - DNA, 20 bp, synthetic construct
  misc_feature 1..20: note = Description of Artificial Sequence: Synthetic oligonucleotide
  misc_feature 1..20: note = Target: SCN10A; (+) strand; PAM type: YTN; PAM sequence: TTG
  source 1..20: mol_type = other DNA
tacatcaacctcctgcaagc

SEQ ID NO: 74474 - DNA, 20 bp, synthetic construct
  misc_feature 1..20: note = Description of Artificial Sequence: Synthetic oligonucleotide
  misc_feature 1..20: note = Target: SCN10A; (+) strand; PAM type: YTN; PAM sequence: CTC
  source 1..20: mol_type = other DNA
ctgcaagccagggctaaatt

SEQ ID NO: 74475 - DNA, 20 bp, synthetic construct
  misc_feature 1..20: note = Description of Artificial Sequence: Synthetic oligonucleotide
  misc_feature 1..20: note = Target: SCN10A; (+) strand; PAM type: YTN; PAM sequence: CTG
  source 1..20: mol_type = other DNA
caagccagggctaaatttgt

SEQ ID NO: 74476 - DNA, 20 bp, synthetic construct
  misc_feature 1..20: note = Description of Artificial Sequence: Synthetic oligonucleotide
  misc_feature 1..20: note = Target: SCN10A; (+) strand; PAM type: YTN; PAM sequence: CTA
  source 1..20: mol_type = other DNA
aatttgtcataaagaacttc

SEQ ID NO: 74477 - DNA, 20 bp, synthetic construct
  misc_feature 1..20: note = Description of Artificial Sequence: Synthetic oligonucleotide
  misc_feature 1..20: note = Target: SCN10A; (+) strand; PAM type: YTN; PAM sequence: TTT
  source 1..20: mol_type = other DNA
gtcataaagaacttccaatc

SEQ ID NO: 74478 - DNA, 20 bp, synthetic construct
  misc_feature 1..20: note = Description of Artificial Sequence: Synthetic oligonucleotide
  misc_feature 1..20: note = Target: SCN10A; (+) strand; PAM type: YTN; PAM sequence: TTG
  source 1..20: mol_type = other DNA
tcataaagaacttccaatcc

SEQ ID NO: 74479 - DNA, 20 bp, synthetic construct
  misc_feature 1..20: note = Description of Artificial Sequence: Synthetic oligonucleotide
  misc_feature 1..20: note = Target: SCN10A; (+) strand; PAM type: YTN; PAM sequence: CTT
  source 1..20: mol_type = other DNA
ccaatccttccgatgaccaa

SEQ ID NO: 74480 - DNA, 20 bp, synthetic construct
  misc_feature 1..20: note = Description of Artificial Sequence: Synthetic oligonucleotide
  misc_feature 1..20: note = Target: SCN10A; (+) strand; PAM type: YTN; PAM sequence: TTC
  source 1..20: mol_type = other DNA
caatccttccgatgaccaag

SEQ ID NO: 74481 - DNA, 20 bp, synthetic construct
  misc_feature 1..20: note = Description of Artificial Sequence: Synthetic oligonucleotide
  misc_feature 1..20: note = Target: SCN10A; (+) strand; PAM type: YTN; PAM sequence: CTT
  source 1..20: mol_type = other DNA
ccgatgaccaaggatcttag

SEQ ID NO: 74482 - DNA, 20 bp, synthetic construct
  misc_feature 1..20: note = Description of Artificial Sequence: Synthetic oligonucleotide
  misc_feature 1..20: note = Target: SCN10A; (+) strand; PAM type: YTN; PAM sequence: TTC
  source 1..20: mol_type = other DNA
cgatgaccaaggatcttagg

SEQ ID NO: 74483 - DNA, 20 bp, synthetic construct
  misc_feature 1..20: note = Description of Artificial Sequence: Synthetic oligonucleotide
  misc_feature 1..20: note = Target: SCN10A; (+) strand; PAM type: YTN; PAM sequence: CTT
  source 1..20: mol_type = other DNA
aggtcattaggatctttcca

SEQ ID NO: 74484 - DNA, 20 bp, synthetic construct
  misc_feature 1..20: note = Description of Artificial Sequence: Synthetic oligonucleotide
  misc_feature 1..20: note = Target: SCN10A; (+) strand; PAM type: YTN; PAM sequence: TTA
  source 1..20: mol_type = other DNA
ggtcattaggatctttccat

SEQ ID NO: 74485 - DNA, 20 bp, synthetic construct
  misc_feature 1..20: note = Description of Artificial Sequence: Synthetic oligonucleotide
  misc_feature 1..20: note = Target: SCN10A; (+) strand; PAM type: YTN; PAM sequence: TTA
  source 1..20: mol_type = other DNA
ggatctttccattaggatca

SEQ ID NO: 74486 - DNA, 20 bp, synthetic construct
  misc_feature 1..20: note = Description of Artificial Sequence: Synthetic oligonucleotide
  misc_feature 1..20: note = Target: SCN10A; (+) strand; PAM type: YTN; PAM sequence: CTT
  source 1..20: mol_type = other DNA
tccattaggatcacccagga

SEQ ID NO: 74487 - DNA, 20 bp, synthetic construct
  misc_feature 1..20: note = Description of Artificial Sequence: Synthetic oligonucleotide
  misc_feature 1..20: note = Target: SCN10A; (+) strand; PAM type: YTN; PAM sequence: TTT
  source 1..20: mol_type = other DNA
ccattaggatcacccaggaa

SEQ ID NO: 74488 - DNA, 20 bp, synthetic construct
  misc_feature 1..20: note = Description of Artificial Sequence: Synthetic oligonucleotide
  misc_feature 1..20: note = Target: SCN10A; (+) strand; PAM type: YTN; PAM sequence: TTC
  source 1..20: mol_type = other DNA
cattaggatcacccaggaag

SEQ ID NO: 74489 - DNA, 20 bp, synthetic construct
  misc_feature 1..20: note = Description of Artificial Sequence: Synthetic oligonucleotide
  misc_feature 1..20: note = Target: SCN10A; (+) strand; PAM type: YTN; PAM sequence: TTA
  source 1..20: mol_type = other DNA
ggatcacccaggaagatctt

SEQ ID NO: 74490 - DNA, 20 bp, synthetic construct
  misc_feature 1..20: note = Description of Artificial Sequence: Synthetic oligonucleotide
  misc_feature 1..20: note = Target: SCN10A; (+) strand; PAM type: YTN; PAM sequence: CTT
  source 1..20: mol_type = other DNA
aggaaaccaaaccaaagtat

SEQ ID NO: 74491 - DNA, 20 bp, synthetic construct
  misc_feature 1..20: note = Description of Artificial Sequence: Synthetic oligonucleotide
  misc_feature 1..20: note = Target: SCN10A; (+) strand; PAM type: YTN; PAM sequence: TTA
  source 1..20: mol_type = other DNA
ggaaaccaaaccaaagtatc

SEQ ID NO: 74492 - DNA, 20 bp, synthetic construct
  misc_feature 1..20: note = Description of Artificial Sequence: Synthetic oligonucleotide
  misc_feature 1..20: note = Target: SCN10A; (+) strand; PAM type: YTN; PAM sequence: CTT
  source 1..20: mol_type = other DNA
ttttctactagtttggcttg

SEQ ID NO: 74493 - DNA, 20 bp, synthetic construct
  misc_feature 1..20: note = Description of Artificial Sequence: Synthetic oligonucleotide
  misc_feature 1..20: note = Target: SCN10A; (+) strand; PAM type: YTN; PAM sequence: TTT
  source 1..20: mol_type = other DNA
tttctactagtttggcttgc

SEQ ID NO: 74494 - DNA, 20 bp, synthetic construct
  misc_feature 1..20: note = Description of Artificial Sequence: Synthetic oligonucleotide
  misc_feature 1..20: note = Target: SCN10A; (+) strand; PAM type: YTN; PAM sequence: TTT
  source 1..20: mol_type = other DNA
ttctactagtttggcttgcc

SEQ ID NO: 74495 - DNA, 20 bp, synthetic construct
  misc_feature 1..20: note = Description of Artificial Sequence: Synthetic oligonucleotide
  misc_feature 1..20: note = Target: SCN10A; (+) strand; PAM type: YTN; PAM sequence: TTT
  source 1..20: mol_type = other DNA
tctactagtttggcttgcct

SEQ ID NO: 74496 - DNA, 20 bp, synthetic construct
  misc_feature 1..20: note = Description of Artificial Sequence: Synthetic oligonucleotide
  misc_feature 1..20: note = Target: SCN10A; (+) strand; PAM type: YTN; PAM sequence: TTT
  source 1..20: mol_type = other DNA
ctactagtttggcttgcctt

SEQ ID NO: 74497 - DNA, 20 bp, synthetic construct
  misc_feature 1..20: note = Description of Artificial Sequence: Synthetic oligonucleotide
  misc_feature 1..20: note = Target: SCN10A; (+) strand; PAM type: YTN; PAM sequence: TTC
  source 1..20: mol_type = other DNA
tactagtttggcttgccttg

SEQ ID NO: 74498 - DNA, 20 bp, synthetic construct
  misc_feature 1..20: note = Description of Artificial Sequence: Synthetic oligonucleotide
  misc_feature 1..20: note = Target: SCN10A; (+) strand; PAM type: YTN; PAM sequence: CTA
  source 1..20: mol_type = other DNA
ctagtttggcttgccttgca

SEQ ID NO: 74499 - DNA, 20 bp, synthetic construct
  misc_feature 1..20: note = Description of Artificial Sequence: Synthetic oligonucleotide
  misc_feature 1..20: note = Target: SCN10A; (+) strand; PAM type: YTN; PAM sequence: CTA
  source 1..20: mol_type = other DNA
gtttggcttgccttgcaaaa

SEQ ID NO: 74500 - DNA, 20 bp, synthetic construct
  misc_feature 1..20: note = Description of Artificial Sequence: Synthetic oligonucleotide
  misc_feature 1..20: note = Target: SCN10A; (+) strand; PAM type: YTN; PAM sequence: TTT
  source 1..20: mol_type = other DNA
ggcttgccttgcaaaatccc

SEQ ID NO: 74501 - DNA, 20 bp, synthetic construct
  misc_feature 1..20: note = Description of Artificial Sequence: Synthetic oligonucleotide
  misc_feature 1..20: note = Target: SCN10A; (+) strand; PAM type: YTN; PAM sequence: TTG
  source 1..20: mol_type = other DNA
gcttgccttgcaaaatcccc

SEQ ID NO: 74502 - DNA, 20 bp, synthetic construct
  misc_feature 1..20: note = Description of Artificial Sequence: Synthetic oligonucleotide
  misc_feature 1..20: note = Target: SCN10A; (+) strand; PAM type: YTN; PAM sequence: CTT
  source 1..20: mol_type = other DNA
gccttgcaaaatcccctgaa

SEQ ID NO: 74503 - DNA, 20 bp, synthetic construct
  misc_feature 1..20: note = Description of Artificial Sequence: Synthetic oligonucleotide
  misc_feature 1..20: note = Target: SCN10A; (+) strand; PAM type: YTN; PAM sequence: TTG
  source 1..20: mol_type = other DNA
ccttgcaaaatcccctgaaa

SEQ ID NO: 74504 - DNA, 20 bp, synthetic construct
  misc_feature 1..20: note = Description of Artificial Sequence: Synthetic oligonucleotide
  misc_feature 1..20: note = Target: SCN10A; (+) strand; PAM type: YTN; PAM sequence: CTT
  source 1..20: mol_type = other DNA
gcaaaatcccctgaaagcag

SEQ ID NO: 74505 - DNA, 20 bp, synthetic construct
  misc_feature 1..20: note = Description of Artificial Sequence: Synthetic oligonucleotide
  misc_feature 1..20: note = Target: SCN10A; (+) strand; PAM type: YTN; PAM sequence: TTG
  source 1..20: mol_type = other DNA
caaaatcccctgaaagcagc

SEQ ID NO: 74506 - DNA, 20 bp, synthetic construct
  misc_feature 1..20: note = Description of Artificial Sequence: Synthetic oligonucleotide
  misc_feature 1..20: note = Target: SCN10A; (+) strand; PAM type: YTN; PAM sequence: CTG
  source 1..20: mol_type = other DNA
aaagcagcttctgacattac

SEQ ID NO: 74507 - DNA, 20 bp, synthetic construct
  misc_feature 1..20: note = Description of Artificial Sequence: Synthetic oligonucleotide
  misc_feature 1..20: note = Target: SCN10A; (+) strand; PAM type: YTN; PAM sequence: CTT
  source 1..20: mol_type = other DNA
ctgacattacctaaaacaat

SEQ ID NO: 74508 - DNA, 20 bp, synthetic construct
  misc_feature 1..20: note = Description of Artificial Sequence: Synthetic oligonucleotide
  misc_feature 1..20: note = Target: SCN10A; (+) strand; PAM type: YTN; PAM sequence: TTC
  source 1..20: mol_type = other DNA
tgacattacctaaaacaatt

SEQ ID NO: 74509 - DNA, 20 bp, synthetic construct
  misc_feature 1..20: note = Description of Artificial Sequence: Synthetic oligonucleotide
  misc_feature 1..20: note = Target: SCN10A; (+) strand; PAM type: YTN; PAM sequence: CTG
  source 1..20: mol_type = other DNA
acattacctaaaacaattca

SEQ ID NO: 74510 - DNA, 20 bp, synthetic construct
  misc_feature 1..20: note = Description of Artificial Sequence: Synthetic oligonucleotide
  misc_feature 1..20: note = Target: SCN10A; (+) strand; PAM type: YTN; PAM sequence: TTA
  source 1..20: mol_type = other DNA
cctaaaacaattcatatagt

SEQ ID NO: 74511 - DNA, 20 bp, synthetic construct
  misc_feature 1..20: note = Description of Artificial Sequence: Synthetic oligonucleotide
  misc_feature 1..20: note = Target: SCN10A; (+) strand; PAM type: YTN; PAM sequence: CTA
  source 1..20: mol_type = other DNA
aaacaattcatatagtagac

SEQ ID NO: 74512 - DNA, 20 bp, synthetic construct
  misc_feature 1..20: note = Description of Artificial Sequence: Synthetic oligonucleotide
  misc_feature 1..20: note = Target: SCN10A; (+) strand; PAM type: YTN; PAM sequence: TTC
  source 1..20: mol_type = other DNA
atatagtagacatttgacca

SEQ ID NO: 74513 - DNA, 20 bp, synthetic construct
  misc_feature 1..20: note = Description of Artificial Sequence: Synthetic oligonucleotide
  misc_feature 1..20: note = Target: SCN10A; (+) strand; PAM type: YTN; PAM sequence: TTT
  source 1..20: mol_type = other DNA
gaccaatgtgtctctaatca

SEQ ID NO: 74514 - DNA, 20 bp, synthetic construct
  misc_feature 1..20: note = Description of Artificial Sequence: Synthetic oligonucleotide
  misc_feature 1..20: note = Target: SCN10A; (+) strand; PAM type: YTN; PAM sequence: TTG
  source 1..20: mol_type = other DNA
accaatgtgtctctaatcat

SEQ ID NO: 74515 - DNA, 20 bp, synthetic construct
  misc_feature 1..20: note = Description of Artificial Sequence: Synthetic oligonucleotide
  misc_feature 1..20: note = Target: SCN10A; (+) strand; PAM type: YTN; PAM sequence: CTC
  source 1..20: mol_type = other DNA
taatcattacagtcttgtat

SEQ ID NO: 74516 - DNA, 20 bp, synthetic construct
  misc_feature 1..20: note = Description of Artificial Sequence: Synthetic oligonucleotide
  misc_feature 1..20: note = Target: SCN10A; (+) strand; PAM type: YTN; PAM sequence: CTA
  source 1..20: mol_type = other DNA
atcattacagtcttgtatgg

SEQ ID NO: 74517 - DNA, 20 bp, synthetic construct
  misc_feature 1..20: note = Description of Artificial Sequence: Synthetic oligonucleotide
  misc_feature 1..20: note = Target: SCN10A; (+) strand; PAM type: YTN; PAM sequence: TTA
  source 1..20: mol_type = other DNA
cagtcttgtatggcatgaac

SEQ ID NO: 74518 - DNA, 20 bp, synthetic construct
  misc_feature 1..20: note = Description of Artificial Sequence: Synthetic oligonucleotide
  misc_feature 1..20: note = Target: SCN10A; (+) strand; PAM type: YTN; PAM sequence: CTT
  source 1..20: mol_type = other DNA
gtatggcatgaacatcagat

SEQ ID NO: 74519 - DNA, 20 bp, synthetic construct
  misc_feature 1..20: note = Description of Artificial Sequence: Synthetic oligonucleotide
  misc_feature 1..20: note = Target: SCN10A; (+) strand; PAM type: YTN; PAM sequence: TTG
  source 1..20: mol_type = other DNA
tatggcatgaacatcagatt

SEQ ID NO: 74520 - DNA, 20 bp, synthetic construct
  misc_feature 1..20: note = Description of Artificial Sequence: Synthetic oligonucleotide
  misc_feature 1..20: note = Target: SCN10A; (+) strand; PAM type: YTN; PAM sequence: TTA
  source 1..20: mol_type = other DNA
ttgacattttaaacctgcta

SEQ ID NO: 74521 - DNA, 20 bp, synthetic construct
  misc_feature 1..20: note = Description of Artificial Sequence: Synthetic oligonucleotide
  misc_feature 1..20: note = Target: SCN10A; (+) strand; PAM type: YTN; PAM sequence: TTG
  source 1..20: mol_type = other DNA
acattttaaacctgctagta

SEQ ID NO: 74522 - DNA, 20 bp, synthetic construct
  misc_feature 1..20: note = Description of Artificial Sequence: Synthetic oligonucleotide
  misc_feature 1..20: note = Target: SCN10A; (+) strand; PAM type: YTN; PAM sequence: TTT
  source 1..20: mol_type = other DNA
taaacctgctagtagttttt

SEQ ID NO: 74523 - DNA, 20 bp, synthetic construct
  misc_feature 1..20: note = Description of Artificial Sequence: Synthetic oligonucleotide
  misc_feature 1..20: note = Target: SCN10A; (+) strand; PAM type: YTN; PAM sequence: TTT
  source 1..20: mol_type = other DNA
aaacctgctagtagtttttg

SEQ ID NO: 74524 - DNA, 20 bp, synthetic construct
  misc_feature 1..20: note = Description of Artificial Sequence: Synthetic oligonucleotide
  misc_feature 1..20: note = Target: SCN10A; (+) strand; PAM type: YTN; PAM sequence: TTA
  source 1..20: mol_type = other DNA
aacctgctagtagtttttga

SEQ ID NO: 74525 - DNA, 20 bp, synthetic construct
  misc_feature 1..20: note = Description of Artificial Sequence: Synthetic oligonucleotide
  misc_feature 1..20: note = Target: SCN10A; (+) strand; PAM type: YTN; PAM sequence: CTG
  source 1..20: mol_type = other DNA
ctagtagtttttgagtaatt

SEQ ID NO: 74526 - DNA, 20 bp, synthetic construct
  misc_feature 1..20: note = Description of Artificial Sequence: Synthetic oligonucleotide
  misc_feature 1..20: note = Target: SCN10A; (+) strand; PAM type: YTN; PAM sequence: CTA
  source 1..20: mol_type = other DNA
gtagtttttgagtaatttgt

SEQ ID NO: 74527 - DNA, 20 bp, synthetic construct
  misc_feature 1..20: note = Description of Artificial Sequence: Synthetic oligonucleotide
  misc_feature 1..20: note = Target: SCN10A; (+) strand; PAM type: YTN; PAM sequence: TTT
  source 1..20: mol_type = other DNA
ttgagtaatttgtgatgtta

SEQ ID NO: 74528 - DNA, 20 bp, synthetic construct
  misc_feature 1..20: note = Description of Artificial Sequence: Synthetic oligonucleotide
  misc_feature 1..20: note = Target: SCN10A; (+) strand; PAM type: YTN; PAM sequence: TTT
  source 1..20: mol_type = other DNA
tgagtaatttgtgatgttaa

SEQ ID NO: 74529 - DNA, 20 bp, synthetic construct
  misc_feature 1..20: note = Description of Artificial Sequence: Synthetic oligonucleotide
  misc_feature 1..20: note = Target: SCN10A; (+) strand; PAM type: YTN; PAM sequence: TTT
  source 1..20: mol_type = other DNA
gagtaatttgtgatgttaac

SEQ ID NO: 74530 - DNA, 20 bp, synthetic construct
  misc_feature 1..20: note = Description of Artificial Sequence: Synthetic oligonucleotide
  misc_feature 1..20: note = Target: SCN10A; (+) strand; PAM type: YTN; PAM sequence: TTG
  source 1..20: mol_type = other DNA
agtaatttgtgatgttaaca

SEQ ID NO: 74531 - DNA, 20 bp, synthetic construct
  misc_feature 1..20: note = Description of Artificial Sequence: Synthetic oligonucleotide
  misc_feature 1..20: note = Target: SCN10A; (+) strand; PAM type: YTN; PAM sequence: TTT
  source 1..20: mol_type = other DNA
gtgatgttaacagtgcccca

SEQ ID NO: 74532 - DNA, 20 bp, synthetic construct
  misc_feature 1..20: note = Description of Artificial Sequence: Synthetic oligonucleotide
  misc_feature 1..20: note = Target: SCN10A; (+) strand; PAM type: YTN; PAM sequence: TTG
  source 1..20: mol_type = other DNA
tgatgttaacagtgccccat

SEQ ID NO: 74533 - DNA, 20 bp, synthetic construct
  misc_feature 1..20: note = Description of Artificial Sequence: Synthetic oligonucleotide
  misc_feature 1..20: note = Target: SCN10A; (+) strand; PAM type: YTN; PAM sequence: TTA
  source 1..20: mol_type = other DNA
acagtgccccatgaccaatg

SEQ ID NO: 74534 - DNA, 20 bp, synthetic construct
  misc_feature 1..20: note = Description of Artificial Sequence: Synthetic oligonucleotide
  misc_feature 1..20: note = Target: SCN10A; (+) strand; PAM type: YTN; PAM sequence: TTG
  source 1..20: mol_type = other DNA
agactatgtgtgctcttccc

SEQ ID NO: 74535 - DNA, 20 bp, synthetic construct
  misc_feature 1..20: note = Description of Artificial Sequence: Synthetic oligonucleotide
  misc_feature 1..20: note = Target: SCN10A; (+) strand; PAM type: YTN; PAM sequence: CTA
  source 1..20: mol_type = other DNA
tgtgtgctcttcccatcatg

SEQ ID NO: 74536 - DNA, 20 bp, synthetic construct
  misc_feature 1..20: note = Description of Artificial Sequence: Synthetic oligonucleotide
  misc_feature 1..20: note = Target: SCN10A; (+) strand; PAM type: YTN; PAM sequence: CTC
  source 1..20: mol_type = other DNA
ttcccatcatggtctgtttt

SEQ ID NO: 74537 - DNA, 20 bp, synthetic construct
  misc_feature 1..20: note = Description of Artificial Sequence: Synthetic oligonucleotide
  misc_feature 1..20: note = Target: SCN10A; (+) strand; PAM type: YTN; PAM sequence: CTT
  source 1..20: mol_type = other DNA
cccatcatggtctgttttcc

SEQ ID NO: 74538 - DNA, 20 bp, synthetic construct
  misc_feature 1..20: note = Description of Artificial Sequence: Synthetic oligonucleotide
  misc_feature 1..20: note = Target: SCN10A; (+) strand; PAM type: YTN; PAM sequence: TTC
  source 1..20: mol_type = other DNA
ccatcatggtctgttttcct

SEQ ID NO: 74539 - DNA, 20 bp, synthetic construct
  misc_feature 1..20: note = Description of Artificial Sequence: Synthetic oligonucleotide
  misc_feature 1..20: note = Target: SCN10A; (+) strand; PAM type: YTN; PAM sequence: CTG
  source 1..20: mol_type = other DNA
ttttccttgccctctgggag

SEQ ID NO: 74540 - DNA, 20 bp, synthetic construct
  misc_feature 1..20: note = Description of Artificial Sequence: Synthetic oligonucleotide
  misc_feature 1..20: note = Target: SCN10A; (+) strand; PAM type: YTN; PAM sequence: TTT
  source 1..20: mol_type = other DNA
tccttgccctctgggaggtg

SEQ ID NO: 74541 - DNA, 20 bp, synthetic construct
  misc_feature 1..20: note = Description of Artificial Sequence: Synthetic oligonucleotide
  misc_feature 1..20: note = Target: SCN10A; (+) strand; PAM type: YTN; PAM sequence: TTT
  source 1..20: mol_type = other DNA
ccttgccctctgggaggtgc

SEQ ID NO: 74542 - DNA, 20 bp, synthetic construct
  misc_feature 1..20: note = Description of Artificial Sequence: Synthetic oligonucleotide
  misc_feature 1..20: note = Target: SCN10A; (+) strand; PAM type: YTN; PAM sequence: TTC
  source 1..20: mol_type = other DNA
cttgccctctgggaggtgct

SEQ ID NO: 74543 - DNA, 20 bp, synthetic construct
  misc_feature 1..20: note = Description of Artificial Sequence: Synthetic oligonucleotide
  misc_feature 1..20: note = Target: SCN10A; (+) strand; PAM type: YTN; PAM sequence: CTT
  source 1..20: mol_type = other DNA
gccctctgggaggtgctgct

SEQ ID NO: 74544 - DNA, 20 bp, synthetic construct
  misc_feature 1..20: note = Description of Artificial Sequence: Synthetic oligonucleotide
  misc_feature 1..20: note = Target: SCN10A; (+) strand; PAM type: YTN; PAM sequence: TTG
  source 1..20: mol_type = other DNA
ccctctgggaggtgctgctc

SEQ ID NO: 74545 - DNA, 20 bp, synthetic construct
  misc_feature 1..20: note = Description of Artificial Sequence: Synthetic oligonucleotide
  misc_feature 1..20: note = Target: SCN10A; (+) strand; PAM type: YTN; PAM sequence: CTC
  source 1..20: mol_type = other DNA
tgggaggtgctgctcttttg

SEQ ID NO: 74546 - DNA, 20 bp, synthetic construct
  misc_feature 1..20: note = Description of Artificial Sequence: Synthetic oligonucleotide
  misc_feature 1..20: note = Target: SCN10A; (+) strand; PAM type: YTN; PAM sequence: CTG
  source 1..20: mol_type = other DNA
ggaggtgctgctcttttgcc

SEQ ID NO: 74547 - DNA, 20 bp, synthetic construct
  misc_feature 1..20: note = Description of Artificial Sequence: Synthetic oligonucleotide
  misc_feature 1..20: note = Target: SCN10A; (+) strand; PAM type: YTN; PAM sequence: CTG
  source 1..20: mol_type = other DNA
ctcttttgcccagtaagcag

SEQ ID NO: 74548 - DNA, 20 bp, synthetic construct
  misc_feature 1..20: note = Description of Artificial Sequence: Synthetic oligonucleotide
  misc_feature 1..20: note = Target: SCN10A; (+) strand; PAM type: YTN; PAM sequence: CTC
  source 1..20: mol_type = other DNA
ttttgcccagtaagcagcca

SEQ ID NO: 74549 - DNA, 20 bp, synthetic construct
  misc_feature 1..20: note = Description of Artificial Sequence: Synthetic oligonucleotide
  misc_feature 1..20: note = Target: SCN10A; (+) strand; PAM type: YTN; PAM sequence: CTT
  source 1..20: mol_type = other DNA
ttgcccagtaagcagccact

SEQ ID NO: 74550 - DNA, 20 bp, synthetic construct
  misc_feature 1..20: note = Description of Artificial Sequence: Synthetic oligonucleotide
  misc_feature 1..20: note = Target: SCN10A; (+) strand; PAM type: YTN; PAM sequence: TTT
  source 1..20: mol_type = other DNA
tgcccagtaagcagccactt

SEQ ID NO: 74551 - DNA, 20 bp, synthetic construct
  misc_feature 1..20: note = Description of Artificial Sequence: Synthetic oligonucleotide
  misc_feature 1..20: note = Target: SCN10A; (+) strand; PAM type: YTN; PAM sequence: TTT
  source 1..20: mol_type = other DNA
gcccagtaagcagccacttc

SEQ ID NO: 74552 - DNA, 20 bp, synthetic construct
  misc_feature 1..20: note = Description of Artificial Sequence: Synthetic oligonucleotide
  misc_feature 1..20: note = Target: SCN10A; (+) strand; PAM type: YTN; PAM sequence: TTG
  source 1..20: mol_type = other DNA
cccagtaagcagccacttct

SEQ ID NO: 74553 - DNA, 20 bp, synthetic construct
  misc_feature 1..20: note = Description of Artificial Sequence: Synthetic oligonucleotide
  misc_feature 1..20: note = Target: SCN10A; (+) strand; PAM type: YTN; PAM sequence: CTT
  source 1..20: mol_type = other DNA
ctcagcatggctatggcaca

SEQ ID NO: 74554 - DNA, 20 bp, synthetic construct
  misc_feature 1..20: note = Description of Artificial Sequence: Synthetic oligonucleotide
  misc_feature 1..20: note = Target: SCN10A; (+) strand; PAM type: YTN; PAM sequence: TTC
  source 1..20: mol_type = other DNA
tcagcatggctatggcacag

SEQ ID NO: 74555 - DNA, 20 bp, synthetic construct
  misc_feature 1..20: note = Description of Artificial Sequence: Synthetic oligonucleotide
  misc_feature 1..20: note = Target: SCN10A; (+) strand; PAM type: YTN; PAM sequence: CTC
  source 1..20: mol_type = other DNA
agcatggctatggcacagag

SEQ ID NO: 74556 - DNA, 20 bp, synthetic construct
  misc_feature 1..20: note = Description of Artificial Sequence: Synthetic oligonucleotide
  misc_feature 1..20: note = Target: SCN10A; (+) strand; PAM type: YTN; PAM sequence: CTA
  source 1..20: mol_type = other DNA
tggcacagagcaacaactca

SEQ ID NO: 74557 - DNA, 20 bp, synthetic construct
  misc_feature 1..20: note = Description of Artificial Sequence: Synthetic oligonucleotide
  misc_feature 1..20: note = Target: SCN10A; (+) strand; PAM type: YTN; PAM sequence: CTC
  source 1..20: mol_type = other DNA
atgcctatctcatctgccca

SEQ ID NO: 74558 - DNA, 20 bp, synthetic construct
  misc_feature 1..20: note = Description of Artificial Sequence: Synthetic oligonucleotide
  misc_feature 1..20: note = Target: SCN10A; (+) strand; PAM type: YTN; PAM sequence: CTA
  source 1..20: mol_type = other DNA
tctcatctgcccaaagaagg

SEQ ID NO: 74559 - DNA, 20 bp, synthetic construct
  misc_feature 1..20: note = Description of Artificial Sequence: Synthetic oligonucleotide
  misc_feature 1..20: note = Target: SCN10A; (+) strand; PAM type: YTN; PAM sequence: CTC
  source 1..20: mol_type = other DNA
atctgcccaaagaaggcttg

SEQ ID NO: 74560 - DNA, 20 bp, synthetic construct
  misc_feature 1..20: note = Description of Artificial Sequence: Synthetic oligonucleotide
  misc_feature 1..20: note = Target: SCN10A; (+) strand; PAM type: YTN; PAM sequence: CTG
  source 1..20: mol_type = other DNA
cccaaagaaggcttgggccc

SEQ ID NO: 74561 - DNA, 20 bp, synthetic construct
  misc_feature 1..20: note = Description of Artificial Sequence: Synthetic oligonucleotide
  misc_feature 1..20: note = Target: SCN10A; (+) strand; PAM type: YTN; PAM sequence: CTT
  source 1..20: mol_type = other DNA
gggccctcttactgcctgtt

SEQ ID NO: 74562 - DNA, 20 bp, synthetic construct
  misc_feature 1..20: note = Description of Artificial Sequence: Synthetic oligonucleotide
  misc_feature 1..20: note = Target: SCN10A; (+) strand; PAM type: YTN; PAM sequence: TTG
  source 1..20: mol_type = other DNA
ggccctcttactgcctgttg

SEQ ID NO: 74563 - DNA, 20 bp, synthetic construct
  misc_feature 1..20: note = Description of Artificial Sequence: Synthetic oligonucleotide
  misc_feature 1..20: note = Target: SCN10A; (+) strand; PAM type: YTN; PAM sequence: CTC
  source 1..20: mol_type = other DNA
ttactgcctgttgtgttgtg

SEQ ID NO: 74564 - DNA, 20 bp, synthetic construct
  misc_feature 1..20: note = Description of Artificial Sequence: Synthetic oligonucleotide
  misc_feature 1..20: note = Target: SCN10A; (+) strand; PAM type: YTN; PAM sequence: CTT
  source 1..20: mol_type = other DNA
actgcctgttgtgttgtggg

SEQ ID NO: 74565 - DNA, 20 bp, synthetic construct
  misc_feature 1..20: note = Description of Artificial Sequence: Synthetic oligonucleotide
  misc_feature 1..20: note = Target: SCN10A; (+) strand; PAM type: YTN; PAM sequence: TTA
  source 1..20: mol_type = other DNA
ctgcctgttgtgttgtgggg

SEQ ID NO: 74566 - DNA, 20 bp, synthetic construct
  misc_feature 1..20: note = Description of Artificial Sequence: Synthetic oligonucleotide
  misc_feature 1..20: note = Target: SCN10A; (+) strand; PAM type: YTN; PAM sequence: CTG
  source 1..20: mol_type = other DNA
cctgttgtgttgtggggaaa

SEQ ID NO: 74567 - DNA, 20 bp, synthetic construct
  misc_feature 1..20: note = Description of Artificial Sequence: Synthetic oligonucleotide
  misc_feature 1..20: note = Target: SCN10A; (+) strand; PAM type: YTN; PAM sequence: CTG
  source 1..20: mol_type = other DNA
ttgtgttgtggggaaagcgg

SEQ ID NO: 74568 - DNA, 20 bp, synthetic construct
  misc_feature 1..20: note = Description of Artificial Sequence: Synthetic oligonucleotide
  misc_feature 1..20: note = Target: SCN10A; (+) strand; PAM type: YTN; PAM sequence: TTG
  source 1..20: mol_type = other DNA
tgttgtggggaaagcggacc

SEQ ID NO: 74569 - DNA, 20 bp, synthetic construct
  misc_feature 1..20: note = Description of Artificial Sequence: Synthetic oligonucleotide
  misc_feature 1..20: note = Target: SCN10A; (+) strand; PAM type: YTN; PAM sequence: TTG
  source 1..20: mol_type = other DNA
tggggaaagcggaccacaca

SEQ ID NO: 74570 - DNA, 20 bp, synthetic construct
  misc_feature 1..20: note = Description of Artificial Sequence: Synthetic oligonucleotide
  misc_feature 1..20: note = Target: SCN10A; (+) strand; PAM type: YTN; PAM sequence: CTG
  source 1..20: mol_type = other DNA
ggggcatcagcaaacctccc

SEQ ID NO: 74571 - DNA, 20 bp, synthetic construct
  misc_feature 1..20: note = Description of Artificial Sequence: Synthetic oligonucleotide
  misc_feature 1..20: note = Target: SCN10A; (+) strand; PAM type: YTN; PAM sequence: CTC
  source 1..20: mol_type = other DNA
ccctcataaagaggatgttt

SEQ ID NO: 74572 - DNA, 20 bp, synthetic construct
  misc_feature 1..20: note = Description of Artificial Sequence: Synthetic oligonucleotide
  misc_feature 1..20: note = Target: SCN10A; (+) strand; PAM type: YTN; PAM sequence: CTC
  source 1..20: mol_type = other DNA
ataaagaggatgtttttcaa

SEQ ID NO: 74573 - DNA, 20 bp, synthetic construct
  misc_feature 1..20: note = Description of Artificial Sequence: Synthetic oligonucleotide
  misc_feature 1..20: note = Target: SCN10A; (+) strand; PAM type: YTN; PAM sequence: TTT
  source 1..20: mol_type = other DNA
ttcaagttgtgcatccacag

SEQ ID NO: 74574 - DNA, 20 bp, synthetic construct
  misc_feature 1..20: note = Description of Artificial Sequence: Synthetic oligonucleotide
  misc_feature 1..20: note = Target: SCN10A; (+) strand; PAM type: YTN; PAM sequence: TTT
  source 1..20: mol_type = other DNA
tcaagttgtgcatccacagg

SEQ ID NO: 74575 - DNA, 20 bp, synthetic construct
  misc_feature 1..20: note = Description of Artificial Sequence: Synthetic oligonucleotide
  misc_feature 1..20: note = Target: SCN10A; (+) strand; PAM type: YTN; PAM sequence: TTT
  source 1..20: mol_type = other DNA
caagttgtgcatccacaggt

SEQ ID NO: 74576 - DNA, 20 bp, synthetic construct
  misc_feature 1..20: note = Description of Artificial Sequence: Synthetic oligonucleotide
  misc_feature 1..20: note = Target: SCN10A; (+) strand; PAM type: YTN; PAM sequence: TTC
  source 1..20: mol_type = other DNA
aagttgtgcatccacaggtg

SEQ ID NO: 74577 - DNA, 20 bp, synthetic construct
  misc_feature 1..20: note = Description of Artificial Sequence: Synthetic oligonucleotide
  misc_feature 1..20: note = Target: SCN10A; (+) strand; PAM type: YTN; PAM sequence: TTG
  source 1..20: mol_type = other DNA
tgcatccacaggtgtgtcta

SEQ ID NO: 74578 - DNA, 20 bp, synthetic construct
  misc_feature 1..20: note = Description of Artificial Sequence: Synthetic oligonucleotide
  misc_feature 1..20: note = Target: SCN10A; (+) strand; PAM type: YTN; PAM sequence: CTA
  source 1..20: mol_type = other DNA
gattagtctgaggtgaatcc

SEQ ID NO: 74579 - DNA, 20 bp, synthetic construct
  misc_feature 1..20: note = Description of Artificial Sequence: Synthetic oligonucleotide
  misc_feature 1..20: note = Target: SCN10A; (+) strand; PAM type: YTN; PAM sequence: TTA
  source 1..20: mol_type = other DNA
gtctgaggtgaatccaaacc

SEQ ID NO: 74580 - DNA, 20 bp, synthetic construct
  misc_feature 1..20: note = Description of Artificial Sequence: Synthetic oligonucleotide
  misc_feature 1..20: note = Target: SCN10A; (+) strand; PAM type: YTN; PAM sequence: CTG
  source 1..20: mol_type = other DNA
aggtgaatccaaaccacctg

SEQ ID NO: 74581 - DNA, 20 bp, synthetic construct
  misc_feature 1..20: note = Description of Artificial Sequence: Synthetic oligonucleotide
  misc_feature 1..20: note = Target: SCN10A; (+) strand; PAM type: YTN; PAM sequence: CTG
  source 1..20: mol_type = other DNA
tgtgttgcataaacacttct

SEQ ID NO: 74582 - DNA, 20 bp, synthetic construct
  misc_feature 1..20: note = Description of Artificial Sequence: Synthetic oligonucleotide
  misc_feature 1..20: note = Target: SCN10A; (+) strand; PAM type: YTN; PAM sequence: TTG
  source 1..20: mol_type = other DNA
cataaacacttcttctgtgt

SEQ ID NO: 74583 - DNA, 20 bp, synthetic construct
  misc_feature 1..20: note = Description of Artificial Sequence: Synthetic oligonucleotide
  misc_feature 1..20: note = Target: SCN10A; (+) strand; PAM type: YTN; PAM sequence: CTT
  source 1..20: mol_type = other DNA
cttctgtgtcttgggactgc

SEQ ID NO: 74584 - DNA, 20 bp, synthetic construct
  misc_feature 1..20: note = Description of Artificial Sequence: Synthetic oligonucleotide
  misc_feature 1..20: note = Target: SCN10A; (+) strand; PAM type: YTN; PAM sequence: TTC
  source 1..20: mol_type = other DNA
ttctgtgtcttgggactgct

SEQ ID NO: 74585 - DNA, 20 bp, synthetic construct
  misc_feature 1..20: note = Description of Artificial Sequence: Synthetic oligonucleotide
  misc_feature 1..20: note = Target: SCN10A; (+) strand; PAM type: YTN; PAM sequence: CTT
  source 1..20: mol_type = other DNA
ctgtgtcttgggactgcttt

SEQ ID NO: 74586 - DNA, 20 bp, synthetic construct
  misc_feature 1..20: note = Description of Artificial Sequence: Synthetic oligonucleotide
  misc_feature 1..20: note = Target: SCN10A; (+) strand; PAM type: YTN; PAM sequence: TTC
  source 1..20: mol_type = other DNA
tgtgtcttgggactgctttg

SEQ ID NO: 74587 - DNA, 20 bp, synthetic construct
  misc_feature 1..20: note = Description of Artificial Sequence: Synthetic oligonucleotide
  misc_feature 1..20: note = Target: SCN10A; (+) strand; PAM type: YTN; PAM sequence: CTG
  source 1..20: mol_type = other DNA
tgtcttgggactgctttggg

SEQ ID NO: 74588 - DNA, 20 bp, synthetic construct
  misc_feature 1..20: note = Description of Artificial Sequence: Synthetic oligonucleotide
  misc_feature 1..20: note = Target: SCN10A; (+) strand; PAM type: YTN; PAM sequence: CTT
  source 1..20: mol_type = other DNA
gggactgctttggggtgtgg

SEQ ID NO: 74589 - DNA, 20 bp, synthetic construct
  misc_feature 1..20: note = Description of Artificial Sequence: Synthetic oligonucleotide
  misc_feature 1..20: note = Target: SCN10A; (+) strand; PAM type: YTN; PAM sequence: TTG
  source 1..20: mol_type = other DNA
ggactgctttggggtgtggg

SEQ ID NO: 74590 - DNA, 20 bp, synthetic construct
  misc_feature 1..20: note = Description of Artificial Sequence: Synthetic oligonucleotide
  misc_feature 1..20: note = Target: SCN10A; (+) strand; PAM type: YTN; PAM sequence: CTG
  source 1..20: mol_type = other DNA
ctttggggtgtgggacacat

SEQ ID NO: 74591 - DNA, 20 bp, synthetic construct
  misc_feature 1..20: note = Description of Artificial Sequence: Synthetic oligonucleotide
  misc_feature 1..20: note = Target: SCN10A; (+) strand; PAM type: YTN; PAM sequence: CTT
  source 1..20: mol_type = other DNA
tggggtgtgggacacattaa

SEQ ID NO: 74592 - DNA, 20 bp, synthetic construct
  misc_feature 1..20: note = Description of Artificial Sequence: Synthetic oligonucleotide
  misc_feature 1..20: note = Target: SCN10A; (+) strand; PAM type: YTN; PAM sequence: TTT
  source 1..20: mol_type = other DNA
ggggtgtgggacacattaaa

SEQ ID NO: 74593 - DNA, 20 bp, synthetic construct
  misc_feature 1..20: note = Description of Artificial Sequence: Synthetic oligonucleotide
  misc_feature 1..20: note = Target: SCN10A; (+) strand; PAM type: YTN; PAM sequence: TTG
  source 1..20: mol_type = other DNA
gggtgtgggacacattaaag

SEQ ID NO: 74594 - DNA, 20 bp, synthetic construct
  misc_feature 1..20: note = Description of Artificial Sequence: Synthetic oligonucleotide
  misc_feature 1..20: note = Target: SCN10A; (+) strand; PAM type: YTN; PAM sequence: TTA
  source 1..20: mol_type = other DNA
aaggcccaagccattttttc

SEQ ID NO: 74595 - DNA, 20 bp, synthetic construct
  misc_feature 1..20: note = Description of Artificial Sequence: Synthetic oligonucleotide
  misc_feature 1..20: note = Target: SCN10A; (+) strand; PAM type: YTN; PAM sequence: TTT
  source 1..20: mol_type = other DNA
tttcaatctaatgacctcat

SEQ ID NO: 74596 - DNA, 20 bp, synthetic construct
  misc_feature 1..20: note = Description of Artificial Sequence: Synthetic oligonucleotide
  misc_feature 1..20: note = Target: SCN10A; (+) strand; PAM type: YTN; PAM sequence: TTT
  source 1..20: mol_type = other DNA
ttcaatctaatgacctcatt

SEQ ID NO: 74597 - DNA, 20 bp, synthetic construct
  misc_feature 1..20: note = Description of Artificial Sequence: Synthetic oligonucleotide
  misc_feature 1..20: note = Target: SCN10A; (+) strand; PAM type: YTN; PAM sequence: TTT
  source 1..20: mol_type = other DNA
tcaatctaatgacctcattg

SEQ ID NO: 74598 - DNA, 20 bp, synthetic construct
  misc_feature 1..20: note = Description of Artificial Sequence: Synthetic oligonucleotide
  misc_feature 1..20: note = Target: SCN10A; (+) strand; PAM type: YTN; PAM sequence: TTT
  source 1..20: mol_type = other DNA
caatctaatgacctcattgt

SEQ ID NO: 74599 - DNA, 20 bp, synthetic construct
  misc_feature 1..20: note = Description of Artificial Sequence: Synthetic oligonucleotide
  misc_feature 1..20: note = Target: SCN10A; (+) strand; PAM type: YTN; PAM sequence: TTC
  source 1..20: mol_type = other DNA
aatctaatgacctcattgta

SEQ ID NO: 74600 - DNA, 20 bp, synthetic construct
  misc_feature 1..20: note = Description of Artificial Sequence: Synthetic oligonucleotide
  misc_feature 1..20: note = Target: SCN10A; (+) strand; PAM type: YTN; PAM sequence: CTA
  source 1..20: mol_type = other DNA
atgacctcattgtacttttg

SEQ ID NO: 74601 - DNA, 20 bp, synthetic construct
  misc_feature 1..20: note = Description of Artificial Sequence: Synthetic oligonucleotide
  misc_feature 1..20: note = Target: SCN10A; (+) strand; PAM type: YTN; PAM sequence: CTC
  source 1..20: mol_type = other DNA
attgtacttttgggattcaa

SEQ ID NO: 74602 - DNA, 20 bp, synthetic construct
  misc_feature 1..20: note = Description of Artificial Sequence: Synthetic oligonucleotide
  misc_feature 1..20: note = Target: SCN10A; (+) strand; PAM type: YTN; PAM sequence: TTG
  source 1..20: mol_type = other DNA
tacttttgggattcaattgg

SEQ ID NO: 74603 - DNA, 20 bp, synthetic construct
  misc_feature 1..20: note = Description of Artificial Sequence: Synthetic oligonucleotide
  misc_feature 1..20: note = Target: SCN10A; (+) strand; PAM type: YTN; PAM sequence: CTT
  source 1..20: mol_type = other DNA
ttgggattcaattggataag

SEQ ID NO: 74604 - DNA, 20 bp, synthetic construct
  misc_feature 1..20: note = Description of Artificial Sequence: Synthetic oligonucleotide
  misc_feature 1..20: note = Target: SCN10A; (+) strand; PAM type: YTN; PAM sequence: TTT
  source 1..20: mol_type = other DNA
tgggattcaattggataagg

SEQ ID NO: 74605 - DNA, 20 bp, synthetic construct
  misc_feature 1..20: note = Description of Artificial Sequence: Synthetic oligonucleotide
  misc_feature 1..20: note = Target: SCN10A; (+) strand; PAM type: YTN; PAM sequence: TTT
  source 1..20: mol_type = other DNA
gggattcaattggataaggg

SEQ ID NO: 74606 - DNA, 20 bp, synthetic construct
  misc_feature 1..20: note = Description of Artificial Sequence: Synthetic oligonucleotide
  misc_feature 1..20: note = Target: SCN10A; (+) strand; PAM type: YTN; PAM sequence: TTG
  source 1..20: mol_type = other DNA
ggattcaattggataagggc

SEQ ID NO: 74607 - DNA, 20 bp, synthetic construct
  misc_feature 1..20: note = Description of Artificial Sequence: Synthetic oligonucleotide
  misc_feature 1..20: note = Target: SCN10A; (+) strand; PAM type: YTN; PAM sequence: TTC
  source 1..20: mol_type = other DNA
aattggataagggctctgtt

SEQ ID NO: 74608 - DNA, 20 bp, synthetic construct
  misc_feature 1..20: note = Description of Artificial Sequence: Synthetic oligonucleotide
  misc_feature 1..20: note = Target: SCN10A; (+) strand; PAM type: YTN; PAM sequence: TTG
  source 1..20: mol_type = other DNA
gataagggctctgttgctaa

SEQ ID NO: 74609 - DNA, 20 bp, synthetic construct
  misc_feature 1..20: note = Description of Artificial Sequence: Synthetic oligonucleotide
  misc_feature 1..20: note = Target: SCN10A; (+) strand; PAM type: YTN; PAM sequence: CTC
  source 1..20: mol_type = other DNA
tgttgctaacctctaaagaa

SEQ ID NO: 74610 - DNA, 20 bp, synthetic construct
  misc_feature 1..20: note = Description of Artificial Sequence: Synthetic oligonucleotide
  misc_feature 1..20: note = Target: SCN10A; (+) strand; PAM type: YTN; PAM sequence: CTG
  source 1..20: mol_type = other DNA
ttgctaacctctaaagaagg

SEQ ID NO: 74611 - DNA, 20 bp, synthetic construct
  misc_feature 1..20: note = Description of Artificial Sequence: Synthetic oligonucleotide
  misc_feature 1..20: note = Target: SCN10A; (+) strand; PAM type: YTN; PAM sequence: TTG
  source 1..20: mol_type = other DNA
ctaacctctaaagaaggtac

SEQ ID NO: 74612 - DNA, 20 bp, synthetic construct
  misc_feature 1..20: note = Description of Artificial Sequence: Synthetic oligonucleotide
  misc_feature 1..20: note = Target: SCN10A; (+) strand; PAM type: YTN; PAM sequence: CTA
  source 1..20: mol_type = other DNA
acctctaaagaaggtactgg

SEQ ID NO: 74613 - DNA, 20 bp, synthetic construct
  misc_feature 1..20: note = Description of Artificial Sequence: Synthetic oligonucleotide
  misc_feature 1..20: note = Target: SCN10A; (+) strand; PAM type: YTN; PAM sequence: CTC
  source 1..20: mol_type = other DNA
taaagaaggtactggacaca

SEQ ID NO: 74614 - DNA, 20 bp, synthetic construct
  misc_feature 1..20: note = Description of Artificial Sequence: Synthetic oligonucleotide
  misc_feature 1..20: note = Target: SCN10A; (+) strand; PAM type: YTN; PAM sequence: CTA
  source 1..20: mol_type = other DNA
aagaaggtactggacacagt

SEQ ID NO: 74615 - DNA, 20 bp, synthetic construct
  misc_feature 1..20: note = Description of Artificial Sequence: Synthetic oligonucleotide
  misc_feature 1..20: note = Target: SCN10A; (+) strand; PAM type: YTN; PAM sequence: CTG
  source 1..20: mol_type = other DNA
gacacagtaggcaaggtcta

SEQ ID NO: 74616 - DNA, 20 bp, synthetic construct
  misc_feature 1..20: note = Description of Artificial Sequence: Synthetic oligonucleotide
  misc_feature 1..20: note = Target: SCN10A; (+) strand; PAM type: YTN; PAM sequence: CTA
  source 1..20: mol_type = other DNA
attgtaacacgtggaagagg

SEQ ID NO: 74617 - DNA, 20 bp, synthetic construct
  misc_feature 1..20: note = Description of Artificial Sequence: Synthetic oligonucleotide
  misc_feature 1..20: note = Target: SCN10A; (+) strand; PAM type: YTN; PAM sequence: TTG
  source 1..20: mol_type = other DNA
taacacgtggaagaggcaat

SEQ ID NO: 74618 - DNA, 20 bp, synthetic construct
  misc_feature 1..20: note = Description of Artificial Sequence: Synthetic oligonucleotide
  misc_feature 1..20: note = Target: SCN10A; (+) strand; PAM type: YTN; PAM sequence: CTT
  source 1..20: mol_type = other DNA
tgatggccgttcttctgatc

SEQ ID NO: 74619 - DNA, 20 bp, synthetic construct
  misc_feature 1..20: note = Description of Artificial Sequence: Synthetic oligonucleotide
  misc_feature 1..20: note = Target: SCN10A; (+) strand; PAM type: YTN; PAM sequence: TTT
  source 1..20: mol_type = other DNA
gatggccgttcttctgatca

SEQ ID NO: 74620 - DNA, 20 bp, synthetic construct
  misc_feature 1..20: note = Description of Artificial Sequence: Synthetic oligonucleotide
  misc_feature 1..20: note = Target: SCN10A; (+) strand; PAM type: YTN; PAM sequence: TTG
  source 1..20: mol_type = other DNA
atggccgttcttctgatcag

SEQ ID NO: 74621 - DNA, 20 bp, synthetic construct
  misc_feature 1..20: note = Description of Artificial Sequence: Synthetic oligonucleotide
  misc_feature 1..20: note = Target: SCN10A; (+) strand; PAM type: YTN; PAM sequence: TTC
  source 1..20: mol_type = other DNA
ttctgatcaggttgaaagga

SEQ ID NO: 74622 - DNA, 20 bp, synthetic construct
  misc_feature 1..20: note = Description of Artificial Sequence: Synthetic oligonucleotide
  misc_feature 1..20: note = Target: SCN10A; (+) strand; PAM type: YTN; PAM sequence: CTT
  source 1..20: mol_type = other DNA
ctgatcaggttgaaaggact

SEQ ID NO: 74623 - DNA, 20 bp, synthetic construct
  misc_feature 1..20: note = Description of Artificial Sequence: Synthetic oligonucleotide
  misc_feature 1..20: note = Target: SCN10A; (+) strand; PAM type: YTN; PAM sequence: TTC
  source 1..20: mol_type = other DNA
tgatcaggttgaaaggactg

SEQ ID NO: 74624 - DNA, 20 bp, synthetic construct
  misc_feature 1..20: note = Description of Artificial Sequence: Synthetic oligonucleotide
  misc_feature 1..20: note = Target: SCN10A; (+) strand; PAM type: YTN; PAM sequence: CTG
  source 1..20: mol_type = other DNA
atcaggttgaaaggactgaa

SEQ ID NO: 74625 - DNA, 20 bp, synthetic construct
  misc_feature 1..20: note = Description of Artificial Sequence: Synthetic oligonucleotide
  misc_feature 1..20: note = Target: SCN10A; (+) strand; PAM type: YTN; PAM sequence: TTG
  source 1..20: mol_type = other DNA
aaaggactgaatagccacag

SEQ ID NO: 74626 - DNA, 20 bp, synthetic construct
  misc_feature 1..20: note = Description of Artificial Sequence: Synthetic oligonucleotide
  misc_feature 1..20: note = Target: SCN10A; (+) strand; PAM type: YTN; PAM sequence: CTG
  source 1..20: mol_type = other DNA
aatagccacagggcccgagt

SEQ ID NO: 74627 - DNA, 20 bp, synthetic construct
  misc_feature 1..20: note = Description of Artificial Sequence: Synthetic oligonucleotide
  misc_feature 1..20: note = Target: SCN10A; (+) strand; PAM type: YTN; PAM sequence: CTA
  source 1..20: mol_type = other DNA
aaccgggaaatggtcctccc

SEQ ID NO: 74628 - DNA, 20 bp, synthetic construct
  misc_feature 1..20: note = Description of Artificial Sequence: Synthetic oligonucleotide
  misc_feature 1..20: note = Target: SCN10A; (+) strand; PAM type: YTN; PAM sequence: CTC
  source 1..20: mol_type = other DNA
cctttgttcagcaccataaa

SEQ ID NO: 74629 - DNA, 20 bp, synthetic construct
  misc_feature 1..20: note = Description of Artificial Sequence: Synthetic oligonucleotide
  misc_feature 1..20: note = Target: SCN10A; (+) strand; PAM type: YTN; PAM sequence: CTT
  source 1..20: mol_type = other DNA
tgttcagcaccataaatgtc

SEQ ID NO: 74630 - DNA, 20 bp, synthetic construct
  misc_feature 1..20: note = Description of Artificial Sequence: Synthetic oligonucleotide
  misc_feature 1..20: note = Target: SCN10A; (+) strand; PAM type: YTN; PAM sequence: TTT
  source 1..20: mol_type = other DNA
gttcagcaccataaatgtct

SEQ ID NO: 74631 - DNA, 20 bp, synthetic construct
  misc_feature 1..20: note = Description of Artificial Sequence: Synthetic oligonucleotide
  misc_feature 1..20: note = Target: SCN10A; (+) strand; PAM type: YTN; PAM sequence: TTG
  source 1..20: mol_type = other DNA
ttcagcaccataaatgtctg

SEQ ID NO: 74632 - DNA, 20 bp, synthetic construct
  misc_feature 1..20: note = Description of Artificial Sequence: Synthetic oligonucleotide
  misc_feature 1..20: note = Target: SCN10A; (+) strand; PAM type: YTN; PAM sequence: TTC
  source 1..20: mol_type = other DNA
agcaccataaatgtctgaaa

SEQ ID NO: 74633 - DNA, 20 bp, synthetic construct
  misc_feature 1..20: note = Description of Artificial Sequence: Synthetic oligonucleotide
  misc_feature 1..20: note = Target: SCN10A; (+) strand; PAM type: YTN; PAM sequence: CTG
  source 1..20: mol_type = other DNA
aaacaaaacaaaacagaaag

SEQ ID NO: 74634 - DNA, 20 bp, synthetic construct
  misc_feature 1..20: note = Description of Artificial Sequence: Synthetic oligonucleotide
  misc_feature 1..20: note = Target: SCN10A; (+) strand; PAM type: YTN; PAM sequence: CTC
  source 1..20: mol_type = other DNA
caatgagaaacaagattcct

SEQ ID NO: 74635 - DNA, 20 bp, synthetic construct
  misc_feature 1..20: note = Description of Artificial Sequence: Synthetic oligonucleotide
  misc_feature 1..20: note = Target: SCN10A; (+) strand; PAM type: YTN; PAM sequence: TTC
  source 1..20: mol_type = other DNA
cttatacaaccatgttttta

SEQ ID NO: 74636 - DNA, 20 bp, synthetic construct
  misc_feature 1..20: note = Description of Artificial Sequence: Synthetic oligonucleotide
  misc_feature 1..20: note = Target: SCN10A; (+) strand; PAM type: YTN; PAM sequence: CTT
  source 1..20: mol_type = other DNA
atacaaccatgtttttaaac

SEQ ID NO: 74637 - DNA, 20 bp, synthetic construct
  misc_feature 1..20: note = Description of Artificial Sequence: Synthetic oligonucleotide
  misc_feature 1..20: note = Target: SCN10A; (+) strand; PAM type: YTN; PAM sequence: TTA
  source 1..20: mol_type = other DNA
tacaaccatgtttttaaaca

SEQ ID NO: 74638 - DNA, 20 bp, synthetic construct
  misc_feature 1..20: note = Description of Artificial Sequence: Synthetic oligonucleotide
  misc_feature 1..20: note = Target: SCN10A; (+) strand; PAM type: YTN; PAM sequence: TTT
  source 1..20: mol_type = other DNA
ttaaacatgagaggcattat

SEQ ID NO: 74639 - DNA, 20 bp, synthetic construct
  misc_feature 1..20: note = Description of Artificial Sequence: Synthetic oligonucleotide
  misc_feature 1..20: note = Target: SCN10A; (+) strand; PAM type: YTN; PAM sequence: TTT
  source 1..20: mol_type = other DNA
taaacatgagaggcattatc

SEQ ID NO: 74640 - DNA, 20 bp, synthetic construct
  misc_feature 1..20: note = Description of Artificial Sequence: Synthetic oligonucleotide
  misc_feature 1..20: note = Target: SCN10A; (+) strand; PAM type: YTN; PAM sequence: TTT
  source 1..20: mol_type = other DNA
aaacatgagaggcattatct

SEQ ID NO: 74641 - DNA, 20 bp, synthetic construct
  misc_feature 1..20: note = Description of Artificial Sequence: Synthetic oligonucleotide
  misc_feature 1..20: note = Target: SCN10A; (+) strand; PAM type: YTN; PAM sequence: TTA
  source 1..20: mol_type = other DNA
aacatgagaggcattatctc

SEQ ID NO: 74642 - DNA, 20 bp, synthetic construct
  misc_feature 1..20: note = Description of Artificial Sequence: Synthetic oligonucleotide
  misc_feature 1..20: note = Target: SCN10A; (+) strand; PAM type: YTN; PAM sequence: TTA
  source 1..20: mol_type = other DNA
tctcaggcttatgagcaaga

SEQ ID NO: 74643 - DNA, 20 bp, synthetic construct
  misc_feature 1..20: note = Description of Artificial Sequence: Synthetic oligonucleotide
  misc_feature 1..20: note = Target: SCN10A; (+) strand; PAM type: YTN; PAM sequence: CTC
  source 1..20: mol_type = other DNA
aggcttatgagcaagaaggg

SEQ ID NO: 74644 - DNA, 20 bp, synthetic construct
  misc_feature 1..20: note = Description of Artificial Sequence: Synthetic oligonucleotide
  misc_feature 1..20: note = Target: SCN10A; (+) strand; PAM type: YTN; PAM sequence: CTT
  source 1..20: mol_type = other DNA
atgagcaagaagggctctgg

SEQ ID NO: 74645 - DNA, 20 bp, synthetic construct
  misc_feature 1..20: note = Description of Artificial Sequence: Synthetic oligonucleotide
  misc_feature 1..20: note = Target: SCN10A; (+) strand; PAM type: YTN; PAM sequence: TTA
  source 1..20: mol_type = other DNA
tgagcaagaagggctctggg

SEQ ID NO: 74646 - DNA, 20 bp, synthetic construct
  misc_feature 1..20: note = Description of Artificial Sequence: Synthetic oligonucleotide
  misc_feature 1..20: note = Target: SCN10A; (+) strand; PAM type: YTN; PAM sequence: CTC
  source 1..20: mol_type = other DNA
tgggaactacaggtcaatga

SEQ ID NO: 74647 - DNA, 20 bp, synthetic construct
  misc_feature 1..20: note = Description of Artificial Sequence: Synthetic oligonucleotide
  misc_feature 1..20: note = Target: SCN10A; (+) strand; PAM type: YTN; PAM sequence: CTG
  source 1..20: mol_type = other DNA
ggaactacaggtcaatgaga

SEQ ID NO: 74648 - DNA, 20 bp, synthetic construct
  misc_feature 1..20: note = Description of Artificial Sequence: Synthetic oligonucleotide
  misc_feature 1..20: note = Target: SCN10A; (+) strand; PAM type: YTN; PAM sequence: CTA
  source 1..20: mol_type = other DNA
caggtcaatgagagtcaaat

SEQ ID NO: 74649 - DNA, 20 bp, synthetic construct
  misc_feature 1..20: note = Description of Artificial Sequence: Synthetic oligonucleotide
  misc_feature 1..20: note = Target: SCN10A; (+) strand; PAM type: YTN; PAM sequence: CTA
  source 1..20: mol_type = other DNA
aaagccatatcctcaccctc

SEQ ID NO: 74650 - DNA, 20 bp, synthetic construct
  misc_feature 1..20: note = Description of Artificial Sequence: Synthetic oligonucleotide
  misc_feature 1..20: note = Target: SCN10A; (+) strand; PAM type: YTN; PAM sequence: CTC
  source 1..20: mol_type = other DNA
accctctcagcaagatcctc

SEQ ID NO: 74651 - DNA, 20 bp, synthetic construct
  misc_feature 1..20: note = Description of Artificial Sequence: Synthetic oligonucleotide
  misc_feature 1..20: note = Target: SCN10A; (+) strand; PAM type: YTN; PAM sequence: CTC
  source 1..20: mol_type = other DNA
tcagcaagatcctcatctct

SEQ ID NO: 74652 - DNA, 20 bp, synthetic construct
  misc_feature 1..20: note = Description of Artificial Sequence: Synthetic oligonucleotide
  misc_feature 1..20: note = Target: SCN10A; (+) strand; PAM type: YTN; PAM sequence: CTC
  source 1..20: mol_type = other DNA
agcaagatcctcatctctgg

SEQ ID NO: 74653 - DNA, 20 bp, synthetic construct
  misc_feature 1..20: note = Description of Artificial Sequence: Synthetic oligonucleotide
  misc_feature 1..20: note = Target: SCN10A; (+) strand; PAM type: YTN; PAM sequence: CTC
  source 1..20: mol_type = other DNA
atctctgggactgacagtgc

SEQ ID NO: 74654 - DNA, 20 bp, synthetic construct
  misc_feature 1..20: note = Description of Artificial Sequence: Synthetic oligonucleotide
  misc_feature 1..20: note = Target: SCN10A; (+) strand; PAM type: YTN; PAM sequence: CTC
  source 1..20: mol_type = other DNA
tgggactgacagtgcaccaa

SEQ ID NO: 74655 - DNA, 20 bp, synthetic construct
  misc_feature 1..20: note = Description of Artificial Sequence: Synthetic oligonucleotide
  misc_feature 1..20: note = Target: SCN10A; (+) strand; PAM type: YTN; PAM sequence: CTG
  source 1..20: mol_type = other DNA
ggactgacagtgcaccaaga

SEQ ID NO: 74656 - DNA, 20 bp, synthetic construct
  misc_feature 1..20: note = Description of Artificial Sequence: Synthetic oligonucleotide
  misc_feature 1..20: note = Target: SCN10A; (+) strand; PAM type: YTN; PAM sequence: CTG
  source 1..20: mol_type = other DNA
acagtgcaccaagatgagcc

SEQ ID NO: 74657 - DNA, 20 bp, synthetic construct
  misc_feature 1..20: note = Description of Artificial Sequence: Synthetic oligonucleotide
  misc_feature 1..20: note = Target: SCN10A; (+) strand; PAM type: YTN; PAM sequence: CTG
  source 1..20: mol_type = other DNA
agggtactttaatggacaga

SEQ ID NO: 74658 - DNA, 20 bp, synthetic construct
  misc_feature 1..20: note = Description of Artificial Sequence: Synthetic oligonucleotide
  misc_feature 1..20: note = Target: SCN10A; (+) strand; PAM type: YTN; PAM sequence: CTT
  source 1..20: mol_type = other DNA
taatggacagacagccaatc

SEQ ID NO: 74659 - DNA, 20 bp, synthetic construct
  misc_feature 1..20: note = Description of Artificial Sequence: Synthetic oligonucleotide
  misc_feature 1..20: note = Target: SCN10A; (+) strand; PAM type: YTN; PAM sequence: TTT
  source 1..20: mol_type = other DNA
aatggacagacagccaatcc

SEQ ID NO: 74660 - DNA, 20 bp, synthetic construct
  misc_feature 1..20: note = Description of Artificial Sequence: Synthetic oligonucleotide
  misc_feature 1..20: note = Target: SCN10A; (+) strand; PAM type: YTN; PAM sequence: TTA
  source 1..20: mol_type = other DNA
atggacagacagccaatcct

SEQ ID NO: 74661 - DNA, 20 bp, synthetic construct
  misc_feature 1..20: note = Description of Artificial Sequence: Synthetic oligonucleotide
  misc_feature 1..20: note = Target: SCN10A; (+) strand; PAM type: YTN; PAM sequence: CTC
  source 1..20: mol_type = other DNA
aggctggtaagaggtgttat

SEQ ID NO: 74662 - DNA, 20 bp, synthetic construct
  misc_feature 1..20: note = Description of Artificial Sequence: Synthetic oligonucleotide
  misc_feature 1..20: note = Target: SCN10A; (+) strand; PAM type: YTN; PAM sequence: CTG
  source 1..20: mol_type = other DNA
gtaagaggtgttatgcccag

SEQ ID NO: 74663 - DNA, 20 bp, synthetic construct
  misc_feature 1..20: note = Description of Artificial Sequence: Synthetic oligonucleotide
  misc_feature 1..20: note = Target: SCN10A; (+) strand; PAM type: YTN; PAM sequence: TTA
  source 1..20: mol_type = other DNA
tgcccaggggaggactctgg

SEQ ID NO: 74664 - DNA, 20 bp, synthetic construct
  misc_feature 1..20: note = Description of Artificial Sequence: Synthetic oligonucleotide
  misc_feature 1..20: note = Target: SCN10A; (+) strand; PAM type: YTN; PAM sequence: CTC
  source 1..20: mol_type = other DNA
tggcaacaggatggtgaagt

SEQ ID NO: 74665 - DNA, 20 bp, synthetic construct
  misc_feature 1..20: note = Description of Artificial Sequence: Synthetic oligonucleotide
  misc_feature 1..20: note = Target: SCN10A; (+) strand; PAM type: YTN; PAM sequence: CTG
  source 1..20: mol_type = other DNA
gcaacaggatggtgaagtta

SEQ ID NO: 74666 - DNA, 20 bp, synthetic construct
  misc_feature 1..20: note = Description of Artificial Sequence: Synthetic oligonucleotide
  misc_feature 1..20: note = Target: SCN10A; (+) strand; PAM type: YTN; PAM sequence: TTA
  source 1..20: mol_type = other DNA
tggttgcatttaatttctct

SEQ ID NO: 74667 - DNA, 20 bp, synthetic construct
  misc_feature 1..20: note = Description of Artificial Sequence: Synthetic oligonucleotide
  misc_feature 1..20: note = Target: SCN10A; (+) strand; PAM type: YTN; PAM sequence: TTG
  source 1..20: mol_type = other DNA
catttaatttctcttctgac

SEQ ID NO: 74668 - DNA, 20 bp, synthetic construct
  misc_feature 1..20: note = Description of Artificial Sequence: Synthetic oligonucleotide
  misc_feature 1..20: note = Target: SCN10A; (+) strand; PAM type: YTN; PAM sequence: TTT
  source 1..20: mol_type = other DNA
aatttctcttctgacaagag

SEQ ID NO: 74669 - DNA, 20 bp, synthetic construct
  misc_feature 1..20: note = Description of Artificial Sequence: Synthetic oligonucleotide
  misc_feature 1..20: note = Target: SCN10A; (+) strand; PAM type: YTN; PAM sequence: TTA
  source 1..20: mol_type = other DNA
atttctcttctgacaagaga

SEQ ID NO: 74670 - DNA, 20 bp, synthetic construct
  misc_feature 1..20: note = Description of Artificial Sequence: Synthetic oligonucleotide
  misc_feature 1..20: note = Target: SCN10A; (+) strand; PAM type: YTN; PAM sequence: TTT
  source 1..20: mol_type = other DNA
ctcttctgacaagagaacca

SEQ ID NO: 74671 - DNA, 20 bp, synthetic construct
  misc_feature 1..20: note = Description of Artificial Sequence: Synthetic oligonucleotide
  misc_feature 1..20: note = Target: SCN10A; (+) strand; PAM type: YTN; PAM sequence: TTC
  source 1..20: mol_type = other DNA
tcttctgacaagagaaccat

SEQ ID NO: 74672 - DNA, 20 bp, synthetic construct
  misc_feature 1..20: note = Description of Artificial Sequence: Synthetic oligonucleotide
  misc_feature 1..20: note = Target: SCN10A; (+) strand; PAM type: YTN; PAM sequence: CTC
  source 1..20: mol_type = other DNA
ttctgacaagagaaccatcc

SEQ ID NO: 74673 - DNA, 20 bp, synthetic construct
  misc_feature 1..20: note = Description of Artificial Sequence: Synthetic oligonucleotide
  misc_feature 1..20: note = Target: SCN10A; (+) strand; PAM type: YTN; PAM sequence: CTT
  source 1..20: mol_type = other DNA
ctgacaagagaaccatcctt

SEQ ID NO: 74674 - DNA, 20 bp, synthetic construct
  misc_feature 1..20: note = Description of Artificial Sequence: Synthetic oligonucleotide
  misc_feature 1..20: note = Target: SCN10A; (+) strand; PAM type: YTN; PAM sequence: TTC
  source 1..20: mol_type = other DNA
tgacaagagaaccatccttg

SEQ ID NO: 74675 - DNA, 20 bp, synthetic construct
  misc_feature 1..20: note = Description of Artificial Sequence: Synthetic oligonucleotide
  misc_feature 1..20: note = Target: SCN10A; (+) strand; PAM type: YTN; PAM sequence: CTG
  source 1..20: mol_type = other DNA
acaagagaaccatccttgtt

SEQ ID NO: 74676 - DNA, 20 bp, synthetic construct
  misc_feature 1..20: note = Description of Artificial Sequence: Synthetic oligonucleotide
  misc_feature 1..20: note = Target: SCN10A; (+) strand; PAM type: YTN; PAM sequence: CTT
  source 1..20: mol_type = other DNA
gttttgtaatgtttcttctg

SEQ ID NO: 74677 - DNA, 20 bp, synthetic construct
  misc_feature 1..20: note = Description of Artificial Sequence: Synthetic oligonucleotide
  misc_feature 1..20: note = Target: SCN10A; (+) strand; PAM type: YTN; PAM sequence: TTG
  source 1..20: mol_type = other DNA
ttttgtaatgtttcttctgt

SEQ ID NO: 74678 - DNA, 20 bp, synthetic construct
  misc_feature 1..20: note = Description of Artificial Sequence: Synthetic oligonucleotide
  misc_feature 1..20: note = Target: SCN10A; (+) strand; PAM type: YTN; PAM sequence: TTT
  source 1..20: mol_type = other DNA
tgtaatgtttcttctgtctc

SEQ ID NO: 74679 - DNA, 20 bp, synthetic construct
  misc_feature 1..20: note = Description of Artificial Sequence: Synthetic oligonucleotide
  misc_feature 1..20: note = Target: SCN10A; (+) strand; PAM type: YTN; PAM sequence: TTT
  source 1..20: mol_type = other DNA
gtaatgtttcttctgtctcc

SEQ ID NO: 74680 - DNA, 20 bp, synthetic construct
  misc_feature 1..20: note = Description of Artificial Sequence: Synthetic oligonucleotide
  misc_feature 1..20: note = Target: SCN10A; (+) strand; PAM type: YTN; PAM sequence: TTG
  source 1..20: mol_type = other DNA
taatgtttcttctgtctcca

SEQ ID NO: 74681 - DNA, 20 bp, synthetic construct
  misc_feature 1..20: note = Description of Artificial Sequence: Synthetic oligonucleotide
  misc_feature 1..20: note = Target: SCN10A; (+) strand; PAM type: YTN; PAM sequence: TTT
  source 1..20: mol_type = other DNA
cttctgtctccaccttctac

SEQ ID NO: 74682 - DNA, 20 bp, synthetic construct
  misc_feature 1..20: note = Description of Artificial Sequence: Synthetic oligonucleotide
  misc_feature 1..20: note = Target: SCN10A; (+) strand; PAM type: YTN; PAM sequence: TTC
  source 1..20: mol_type = other DNA
ttctgtctccaccttctaca

SEQ ID NO: 74683 - DNA, 20 bp, synthetic construct
  misc_feature 1..20: note = Description of Artificial Sequence: Synthetic oligonucleotide
  misc_feature 1..20: note = Target: SCN10A; (+) strand; PAM type: YTN; PAM sequence: CTT
  source 1..20: mol_type = other DNA
ctgtctccaccttctacatc

SEQ ID NO: 74684 - DNA, 20 bp, synthetic construct
  misc_feature 1..20: note = Description of Artificial Sequence: Synthetic oligonucleotide
  misc_feature 1..20: note = Target: SCN10A; (+) strand; PAM type: YTN; PAM sequence: TTC
  source 1..20: mol_type = other DNA
tgtctccaccttctacatct

SEQ ID NO: 74685 - DNA, 20 bp, synthetic construct
  misc_feature 1..20: note = Description of Artificial Sequence: Synthetic oligonucleotide
  misc_feature 1..20: note = Target: SCN10A; (+) strand; PAM type: YTN; PAM sequence: CTG
  source 1..20: mol_type = other DNA
tctccaccttctacatctct

SEQ ID NO: 74686 - DNA, 20 bp, synthetic construct
  misc_feature 1..20: note = Description of Artificial Sequence: Synthetic oligonucleotide
  misc_feature 1..20: note = Target: SCN10A; (+) strand; PAM type: YTN; PAM sequence: CTC
  source 1..20: mol_type = other DNA
caccttctacatctctgtct

SEQ ID NO: 74687 - DNA, 20 bp, synthetic construct
  misc_feature 1..20: note = Description of Artificial Sequence: Synthetic oligonucleotide
  misc_feature 1..20: note = Target: SCN10A; (+) strand; PAM type: YTN; PAM sequence: CTT
  source 1..20: mol_type = other DNA
ctacatctctgtctcttaaa

SEQ ID NO: 74688 - DNA, 20 bp, synthetic construct
  misc_feature 1..20: note = Description of Artificial Sequence: Synthetic oligonucleotide
  misc_feature 1..20: note = Target: SCN10A; (+) strand; PAM type: YTN; PAM sequence: TTC
  source 1..20: mol_type = other DNA
tacatctctgtctcttaaat

SEQ ID NO: 74689 - DNA, 20 bp, synthetic construct
  misc_feature 1..20: note = Description of Artificial Sequence: Synthetic oligonucleotide
  misc_feature 1..20: note = Target: SCN10A; (+) strand; PAM type: YTN; PAM sequence: CTA
  source 1..20: mol_type = other DNA
catctctgtctcttaaatcc

SEQ ID NO: 74690 - DNA, 20 bp, synthetic construct
  misc_feature 1..20: note = Description of Artificial Sequence: Synthetic oligonucleotide
  misc_feature 1..20: note = Target: SCN10A; (+) strand; PAM type: YTN; PAM sequence: CTC
  source 1..20: mol_type = other DNA
tgtctcttaaatcctctcct

SEQ ID NO: 74691 - DNA, 20 bp, synthetic construct
  misc_feature 1..20: note = Description of Artificial Sequence: Synthetic oligonucleotide
  misc_feature 1..20: note = Target: SCN10A; (+) strand; PAM type: YTN; PAM sequence: CTG
  source 1..20: mol_type = other DNA
tctcttaaatcctctcctgg

SEQ ID NO: 74692 - DNA, 20 bp, synthetic construct
  misc_feature 1..20: note = Description of Artificial Sequence: Synthetic oligonucleotide
  misc_feature 1..20: note = Target: SCN10A; (+) strand; PAM type: YTN; PAM sequence: CTC
  source 1..20: mol_type = other DNA
ttaaatcctctcctggtttc

SEQ ID NO: 74693 - DNA, 20 bp, synthetic construct
  misc_feature 1..20: note = Description of Artificial Sequence: Synthetic oligonucleotide
  misc_feature 1..20: note = Target: SCN10A; (+) strand; PAM type: YTN; PAM sequence: CTT
  source 1..20: mol_type = other DNA
aaatcctctcctggtttctc

SEQ ID NO: 74694 - DNA, 20 bp, synthetic construct
  misc_feature 1..20: note = Description of Artificial Sequence: Synthetic oligonucleotide
  misc_feature 1..20: note = Target: SCN10A; (+) strand; PAM type: YTN; PAM sequence: TTA
  source 1..20: mol_type = other DNA
aatcctctcctggtttctcc

SEQ ID NO: 74695 - DNA, 20 bp, synthetic construct
  misc_feature 1..20: note = Description of Artificial Sequence: Synthetic oligonucleotide
  misc_feature 1..20: note = Target: SCN10A; (+) strand; PAM type: YTN; PAM sequence: CTC
  source 1..20: mol_type = other DNA
tcctggtttctccctctgag

SEQ ID NO: 74696 - DNA, 20 bp, synthetic construct
  misc_feature 1..20: note = Description of Artificial Sequence: Synthetic oligonucleotide
  misc_feature 1..20: note = Target: SCN10A; (+) strand; PAM type: YTN; PAM sequence: CTC
  source 1..20: mol_type = other DNA
ctggtttctccctctgagga

SEQ ID NO: 74697 - DNA, 20 bp, synthetic construct
  misc_feature 1..20: note = Description of Artificial Sequence: Synthetic oligonucleotide
  misc_feature 1..20: note = Target: SCN10A; (+) strand; PAM type: YTN; PAM sequence: CTG
  source 1..20: mol_type = other DNA
gtttctccctctgaggattt

SEQ ID NO: 74698 - DNA, 20 bp, synthetic construct
  misc_feature 1..20: note = Description of Artificial Sequence: Synthetic oligonucleotide
  misc_feature 1..20: note = Target: SCN10A; (+) strand; PAM type: YTN; PAM sequence: TTT
  source 1..20: mol_type = other DNA
ctccctctgaggatttagga

SEQ ID NO: 74699 - DNA, 20 bp, synthetic construct
  misc_feature 1..20: note = Description of Artificial Sequence: Synthetic oligonucleotide
  misc_feature 1..20: note = Target: SCN10A; (+) strand; PAM type: YTN; PAM sequence: TTC
  source 1..20: mol_type = other DNA
tccctctgaggatttaggag

SEQ ID NO: 74700 - DNA, 20 bp, synthetic construct
  misc_feature 1..20: note = Description of Artificial Sequence: Synthetic oligonucleotide
  misc_feature 1..20: note = Target: SCN10A; (+) strand; PAM type: YTN; PAM sequence: CTC
  source 1..20: mol_type = other DNA
cctctgaggatttaggagga

SEQ ID NO: 74701 - DNA, 20 bp, synthetic construct
  misc_feature 1..20: note = Description of Artificial Sequence: Synthetic oligonucleotide
  misc_feature 1..20: note = Target: SCN10A; (+) strand; PAM type: YTN; PAM sequence: CTC
  source 1..20: mol_type = other DNA
tgaggatttaggaggatatg

SEQ ID NO: 74702 - DNA, 20 bp, synthetic construct
  misc_feature 1..20: note = Description of Artificial Sequence: Synthetic oligonucleotide
  misc_feature 1..20: note = Target: SCN10A; (+) strand; PAM type: YTN; PAM sequence: CTG
  source 1..20: mol_type = other DNA
aggatttaggaggatatgaa

SEQ ID NO: 74703 - DNA, 20 bp, synthetic construct
  misc_feature 1..20: note = Description of Artificial Sequence: Synthetic oligonucleotide
  misc_feature 1..20: note = Target: SCN10A; (+) strand; PAM type: YTN; PAM sequence: TTT
  source 1..20: mol_type = other DNA
aggaggatatgaactcttgg

SEQ ID NO: 74704 - DNA, 20 bp, synthetic construct
  misc_feature 1..20: note = Description of Artificial Sequence: Synthetic oligonucleotide
  misc_feature 1..20: note = Target: SCN10A; (+) strand; PAM type: YTN; PAM sequence: TTA
  source 1..20: mol_type = other DNA
ggaggatatgaactcttggc

SEQ ID NO: 74705 - DNA, 20 bp, synthetic construct
  misc_feature 1..20: note = Description of Artificial Sequence: Synthetic oligonucleotide
  misc_feature 1..20: note = Target: SCN10A; (+) strand; PAM type: YTN; PAM sequence: CTC
  source 1..20: mol_type = other DNA
ttggcatgggagaggaggaa

SEQ ID NO: 74706 - DNA, 20 bp, synthetic construct
  misc_feature 1..20: note = Description of Artificial Sequence: Synthetic oligonucleotide
  misc_feature 1..20: note = Target: SCN10A; (+) strand; PAM type: YTN; PAM sequence: CTT
  source 1..20: mol_type = other DNA
ggcatgggagaggaggaaga

SEQ ID NO: 74707 - DNA, 20 bp, synthetic construct
  misc_feature 1..20: note = Description of Artificial Sequence: Synthetic oligonucleotide
  misc_feature 1..20: note = Target: SCN10A; (+) strand; PAM type: YTN; PAM sequence: TTG
  source 1..20: mol_type = other DNA
gcatgggagaggaggaagaa

SEQ ID NO: 74708 - DNA, 20 bp, synthetic construct
  misc_feature 1..20: note = Description of Artificial Sequence: Synthetic oligonucleotide
  misc_feature 1..20: note = Target: SCN10A; (+) strand; PAM type: YTN; PAM sequence: TTC
  source 1..20: mol_type = other DNA
agtgcctttttatttactct

SEQ ID NO: 74709 - DNA, 20 bp, synthetic construct
  misc_feature 1..20: note = Description of Artificial Sequence: Synthetic oligonucleotide
  misc_feature 1..20: note = Target: SCN10A; (+) strand; PAM type: YTN; PAM sequence: CTT
  source 1..20: mol_type = other DNA
tttatttactctgctagcca

SEQ ID NO: 74710 - DNA, 20 bp, synthetic construct
  misc_feature 1..20: note = Description of Artificial Sequence: Synthetic oligonucleotide
  misc_feature 1..20: note = Target: SCN10A; (+) strand; PAM type: YTN; PAM sequence: TTT
  source 1..20: mol_type = other DNA
ttatttactctgctagccat

SEQ ID NO: 74711 - DNA, 20 bp, synthetic construct
  misc_feature 1..20: note = Description of Artificial Sequence: Synthetic oligonucleotide
  misc_feature 1..20: note = Target: SCN10A; (+) strand; PAM type: YTN; PAM sequence: TTT
  source 1..20: mol_type = other DNA
tatttactctgctagccata

SEQ ID NO: 74712 - DNA, 20 bp, synthetic construct
  misc_feature 1..20: note = Description of Artificial Sequence: Synthetic oligonucleotide
  misc_feature 1..20: note = Target: SCN10A; (+) strand; PAM type: YTN; PAM sequence: TTT
  source 1..20: mol_type = other DNA
atttactctgctagccatat

SEQ ID NO: 74713 - DNA, 20 bp, synthetic construct
  misc_feature 1..20: note = Description of Artificial Sequence: Synthetic oligonucleotide
  misc_feature 1..20: note = Target: SCN10A; (+) strand; PAM type: YTN; PAM sequence: TTA
  source 1..20: mol_type = other DNA
tttactctgctagccatatt

SEQ ID NO: 74714 - DNA, 20 bp, synthetic construct
  misc_feature 1..20: note = Description of Artificial Sequence: Synthetic oligonucleotide
  misc_feature 1..20: note = Target: SCN10A; (+) strand; PAM type: YTN; PAM sequence: TTT
  source 1..20: mol_type = other DNA
actctgctagccatatttga

SEQ ID NO: 74715 - DNA, 20 bp, synthetic construct
  misc_feature 1..20: note = Description of Artificial Sequence: Synthetic oligonucleotide
  misc_feature 1..20: note = Target: SCN10A; (+) strand; PAM type: YTN; PAM sequence: TTA
  source 1..20: mol_type = other DNA
ctctgctagccatatttgag

SEQ ID NO: 74716 - DNA, 20 bp, synthetic construct
  misc_feature 1..20: note = Description of Artificial Sequence: Synthetic oligonucleotide
  misc_feature 1..20: note = Target: SCN10A; (+) strand; PAM type: YTN; PAM sequence: CTC
  source 1..20: mol_type = other DNA
tgctagccatatttgagatg

SEQ ID NO: 74717 - DNA, 20 bp, synthetic construct
  misc_feature 1..20: note = Description of Artificial Sequence: Synthetic oligonucleotide
  misc_feature 1..20: note = Target: SCN10A; (+) strand; PAM type: YTN; PAM sequence: CTG
  source 1..20: mol_type = other DNA
ctagccatatttgagatggc

SEQ ID NO: 74718 - DNA, 20 bp, synthetic construct
  misc_feature 1..20: note = Description of Artificial Sequence: Synthetic oligonucleotide
  misc_feature 1..20: note = Target: SCN10A; (+) strand; PAM type: YTN; PAM sequence: CTA
  source 1..20: mol_type = other DNA
gccatatttgagatggctga

SEQ ID NO: 74719 - DNA, 20 bp, synthetic construct
  misc_feature 1..20: note = Description of Artificial Sequence: Synthetic oligonucleotide
  misc_feature 1..20: note = Target: SCN10A; (+) strand; PAM type: YTN; PAM sequence: TTT
  source 1..20: mol_type = other DNA
gagatggctgattcctgtcc

SEQ ID NO: 74720 - DNA, 20 bp, synthetic construct
  misc_feature 1..20: note = Description of Artificial Sequence: Synthetic oligonucleotide
  misc_feature 1..20: note = Target: SCN10A; (+) strand; PAM type: YTN; PAM sequence: TTG
  source 1..20: mol_type = other DNA
agatggctgattcctgtcct

SEQ ID NO: 74721 - DNA, 20 bp, synthetic construct
  misc_feature 1..20: note = Description of Artificial Sequence: Synthetic oligonucleotide
  misc_feature 1..20: note = Target: SCN10A; (+) strand; PAM type: YTN; PAM sequence: CTG
  source 1..20: mol_type = other DNA
attcctgtcctcctaactcc

SEQ ID NO: 74722 - DNA, 20 bp, synthetic construct
  misc_feature 1..20: note = Description of Artificial Sequence: Synthetic oligonucleotide
  misc_feature 1..20: note = Target: SCN10A; (+) strand; PAM type: YTN; PAM sequence: TTC
  source 1..20: mol_type = other DNA
ctgtcctcctaactcccaaa

SEQ ID NO: 74723 - DNA, 20 bp, synthetic construct
  misc_feature 1..20: note = Description of Artificial Sequence: Synthetic oligonucleotide
  misc_feature 1..20: note = Target: SCN10A; (+) strand; PAM type: YTN; PAM sequence: CTG
  source 1..20: mol_type = other DNA
tcctcctaactcccaaacat

SEQ ID NO: 74724 - DNA, 20 bp, synthetic construct
  misc_feature 1..20: note = Description of Artificial Sequence: Synthetic oligonucleotide
  misc_feature 1..20: note = Target: SCN10A; (+) strand; PAM type: YTN; PAM sequence: CTC
  source 1..20: mol_type = other DNA
ctaactcccaaacatgcatt

SEQ ID NO: 74725 - DNA, 20 bp, synthetic construct
  misc_feature 1..20: note = Description of Artificial Sequence: Synthetic oligonucleotide
  misc_feature 1..20: note = Target: SCN10A; (+) strand; PAM type: YTN; PAM sequence: CTA
  source 1..20: mol_type = other DNA
actcccaaacatgcattcac

SEQ ID NO: 74726 - DNA, 20 bp, synthetic construct
  misc_feature 1..20: note = Description of Artificial Sequence: Synthetic oligonucleotide
  misc_feature 1..20: note = Target: SCN10A; (+) strand; PAM type: YTN; PAM sequence: CTC
  source 1..20: mol_type = other DNA
ccaaacatgcattcaccatt

SEQ ID NO: 74727 - DNA, 20 bp, synthetic construct
  misc_feature 1..20: note = Description of Artificial Sequence: Synthetic oligonucleotide
  misc_feature 1..20: note = Target: SCN10A; (+) strand; PAM type: YTN; PAM sequence: TTC
  source 1..20: mol_type = other DNA
accattttttggctcgtaga

SEQ ID NO: 74728 - DNA, 20 bp, synthetic construct
  misc_feature 1..20: note = Description of Artificial Sequence: Synthetic oligonucleotide
  misc_feature 1..20: note = Target: SCN10A; (+) strand; PAM type: YTN; PAM sequence: TTT
  source 1..20: mol_type = other DNA
tttggctcgtagaacatcaa

SEQ ID NO: 74729 - DNA, 20 bp, synthetic construct
  misc_feature 1..20: note = Description of Artificial Sequence: Synthetic oligonucleotide
  misc_feature 1..20: note = Target: SCN10A; (+) strand; PAM type: YTN; PAM sequence: TTT
  source 1..20: mol_type = other DNA
ttggctcgtagaacatcaaa

SEQ ID NO: 74730 - DNA, 20 bp, synthetic construct
  misc_feature 1..20: note = Description of Artificial Sequence: Synthetic oligonucleotide
  misc_feature 1..20: note = Target: SCN10A; (+) strand; PAM type: YTN; PAM sequence: TTT
  source 1..20: mol_type = other DNA
tggctcgtagaacatcaaaa

SEQ ID NO: 74731 - DNA, 20 bp, synthetic construct
  misc_feature 1..20: note = Description of Artificial Sequence: Synthetic oligonucleotide
  misc_feature 1..20: note = Target: SCN10A; (+) strand; PAM type: YTN; PAM sequence: TTT
  source 1..20: mol_type = other DNA
ggctcgtagaacatcaaaaa

SEQ ID NO: 74732 - DNA, 20 bp, synthetic construct
  misc_feature 1..20: note = Description of Artificial Sequence: Synthetic oligonucleotide
  misc_feature 1..20: note = Target: SCN10A; (+) strand; PAM type: YTN; PAM sequence: TTG
  source 1..20: mol_type = other DNA
gctcgtagaacatcaaaaat

SEQ ID NO: 74733 - DNA, 20 bp, synthetic construct
  misc_feature 1..20: note = Description of Artificial Sequence: Synthetic oligonucleotide
  misc_feature 1..20: note = Target: SCN10A; (+) strand; PAM type: YTN; PAM sequence: CTC
  source 1..20: mol_type = other DNA
gtagaacatcaaaaatacaa

SEQ ID NO: 74734 - DNA, 20 bp, synthetic construct
  misc_feature 1..20: note = Description of Artificial Sequence: Synthetic oligonucleotide
  misc_feature 1..20: note = Target: SCN10A; (+) strand; PAM type: YTN; PAM sequence: TTG
  source 1..20: mol_type = other DNA
tcatgaagaagctcttgttt

SEQ ID NO: 74735 - DNA, 20 bp, synthetic construct
  misc_feature 1..20: note = Description of Artificial Sequence: Synthetic oligonucleotide
  misc_feature 1..20: note = Target: SCN10A; (+) strand; PAM type: YTN; PAM sequence: CTC
  source 1..20: mol_type = other DNA
ttgtttaaactactgattct

SEQ ID NO: 74736 - DNA, 20 bp, synthetic construct
  misc_feature 1..20: note = Description of Artificial Sequence: Synthetic oligonucleotide
  misc_feature 1..20: note = Target: SCN10A; (+) strand; PAM type: YTN; PAM sequence: CTT
  source 1..20: mol_type = other DNA
gtttaaactactgattctca

SEQ ID NO: 74737 - DNA, 20 bp, synthetic construct
  misc_feature 1..20: note = Description of Artificial Sequence: Synthetic oligonucleotide
  misc_feature 1..20: note = Target: SCN10A; (+) strand; PAM type: YTN; PAM sequence: TTG
  source 1..20: mol_type = other DNA
tttaaactactgattctcaa

SEQ ID NO: 74738 - DNA, 20 bp, synthetic construct
  misc_feature 1..20: note = Description of Artificial Sequence: Synthetic oligonucleotide
  misc_feature 1..20: note = Target: SCN10A; (+) strand; PAM type: YTN; PAM sequence: TTT
  source 1..20: mol_type = other DNA
aaactactgattctcaaact

SEQ ID NO: 74739 - DNA, 20 bp, synthetic construct
  misc_feature 1..20: note = Description of Artificial Sequence: Synthetic oligonucleotide
  misc_feature 1..20: note = Target: SCN10A; (+) strand; PAM type: YTN; PAM sequence: TTA
  source 1..20: mol_type = other DNA
aactactgattctcaaactt

SEQ ID NO: 74740 - DNA, 20 bp, synthetic construct
  misc_feature 1..20: note = Description of Artificial Sequence: Synthetic oligonucleotide
  misc_feature 1..20: note = Target: SCN10A; (+) strand; PAM type: YTN; PAM sequence: CTA
  source 1..20: mol_type = other DNA
ctgattctcaaactttttga

SEQ ID NO: 74741 - DNA, 20 bp, synthetic construct
  misc_feature 1..20: note = Description of Artificial Sequence: Synthetic oligonucleotide
  misc_feature 1..20: note = Target: SCN10A; (+) strand; PAM type: YTN; PAM sequence: CTG
  source 1..20: mol_type = other DNA
attctcaaactttttgattt

SEQ ID NO: 74742 - DNA, 20 bp, synthetic construct
  misc_feature 1..20: note = Description of Artificial Sequence: Synthetic oligonucleotide
  misc_feature 1..20: note = Target: SCN10A; (+) strand; PAM type: YTN; PAM sequence: TTC
  source 1..20: mol_type = other DNA
tcaaactttttgatttcagg

SEQ ID NO: 74743 - DNA, 20 bp, synthetic construct
  misc_feature 1..20: note = Description of Artificial Sequence: Synthetic oligonucleotide
  misc_feature 1..20: note = Target: SCN10A; (+) strand; PAM type: YTN; PAM sequence: CTC
  source 1..20: mol_type = other DNA
aaactttttgatttcaggga

SEQ ID NO: 74744 - DNA, 20 bp, synthetic construct
  misc_feature 1..20: note = Description of Artificial Sequence: Synthetic oligonucleotide
  misc_feature 1..20: note = Target: SCN10A; (+) strand; PAM type: YTN; PAM sequence: CTT
  source 1..20: mol_type = other DNA
tttgatttcagggattatta

SEQ ID NO: 74745 - DNA, 20 bp, synthetic construct
  misc_feature 1..20: note = Description of Artificial Sequence: Synthetic oligonucleotide
  misc_feature 1..20: note = Target: SCN10A; (+) strand; PAM type: YTN; PAM sequence: TTT
  source 1..20: mol_type = other DNA
ttgatttcagggattattac

SEQ ID NO: 74746 - DNA, 20 bp, synthetic construct
  misc_feature 1..20: note = Description of Artificial Sequence: Synthetic oligonucleotide
  misc_feature 1..20: note = Target: SCN10A; (+) strand; PAM type: YTN; PAM sequence: TTT
  source 1..20: mol_type = other DNA
tgatttcagggattattact

SEQ ID NO: 74747 - DNA, 20 bp, synthetic construct
  misc_feature 1..20: note = Description of Artificial Sequence: Synthetic oligonucleotide
  misc_feature 1..20: note = Target: SCN10A; (+) strand; PAM type: YTN; PAM sequence: TTT
  source 1..20: mol_type = other DNA
gatttcagggattattactc

SEQ ID NO: 74748 - DNA, 20 bp, synthetic construct
  misc_feature 1..20: note = Description of Artificial Sequence: Synthetic oligonucleotide
  misc_feature 1..20: note = Target: SCN10A; (+) strand; PAM type: YTN; PAM sequence: TTG
  source 1..20: mol_type = other DNA
atttcagggattattactct

SEQ ID NO: 74749 - DNA, 20 bp, synthetic construct
  misc_feature 1..20: note = Description of Artificial Sequence: Synthetic oligonucleotide
  misc_feature 1..20: note = Target: SCN10A; (+) strand; PAM type: YTN; PAM sequence: TTT
  source 1..20: mol_type = other DNA
cagggattattactctcaaa

SEQ ID NO: 74750 - DNA, 20 bp, synthetic construct
  misc_feature 1..20: note = Description of Artificial Sequence: Synthetic oligonucleotide
  misc_feature 1..20: note = Target: SCN10A; (+) strand; PAM type: YTN; PAM sequence: TTC
  source 1..20: mol_type = other DNA
agggattattactctcaaac

SEQ ID NO: 74751 - DNA, 20 bp, synthetic construct
  misc_feature 1..20: note = Description of Artificial Sequence: Synthetic oligonucleotide
  misc_feature 1..20: note = Target: SCN10A; (+) strand; PAM type: YTN; PAM sequence: TTA
  source 1..20: mol_type = other DNA
ttactctcaaaccttattga

SEQ ID NO: 74752 - DNA, 20 bp, synthetic construct
  misc_feature 1..20: note = Description of Artificial Sequence: Synthetic oligonucleotide
  misc_feature 1..20: note = Target: SCN10A; (+) strand; PAM type: YTN; PAM sequence: TTA
  source 1..20: mol_type = other DNA
ctctcaaaccttattgagga

SEQ ID NO: 74753 - DNA, 20 bp, synthetic construct
  misc_feature 1..20: note = Description of Artificial Sequence: Synthetic oligonucleotide
  misc_feature 1..20: note = Target: SCN10A; (+) strand; PAM type: YTN; PAM sequence: CTC
  source 1..20: mol_type = other DNA
tcaaaccttattgaggaccc

SEQ ID NO: 74754 - DNA, 20 bp, synthetic construct
  misc_feature 1..20: note = Description of Artificial Sequence: Synthetic oligonucleotide
  misc_feature 1..20: note = Target: SCN10A; (+) strand; PAM type: YTN; PAM sequence: CTC
  source 1..20: mol_type = other DNA
aaaccttattgaggacccca

SEQ ID NO: 74755 - DNA, 20 bp, synthetic construct
  misc_feature 1..20: note = Description of Artificial Sequence: Synthetic oligonucleotide
  misc_feature 1..20: note = Target: SCN10A; (+) strand; PAM type: YTN; PAM sequence: CTT
  source 1..20: mol_type = other DNA
attgaggaccccaaataact

SEQ ID NO: 74756 - DNA, 20 bp, synthetic construct
  misc_feature 1..20: note = Description of Artificial Sequence: Synthetic oligonucleotide
  misc_feature 1..20: note = Target: SCN10A; (+) strand; PAM type: YTN; PAM sequence: TTA
  source 1..20: mol_type = other DNA
ttgaggaccccaaataactt

SEQ ID NO: 74757 - DNA, 20 bp, synthetic construct
  misc_feature 1..20: note = Description of Artificial Sequence: Synthetic oligonucleotide
  misc_feature 1..20: note = Target: SCN10A; (+) strand; PAM type: YTN; PAM sequence: TTG
  source 1..20: mol_type = other DNA
aggaccccaaataacttttg

SEQ ID NO: 74758 - DNA, 20 bp, synthetic construct
  misc_feature 1..20: note = Description of Artificial Sequence: Synthetic oligonucleotide
  misc_feature 1..20: note = Target: SCN10A; (+) strand; PAM type: YTN; PAM sequence: CTT
  source 1..20: mol_type = other DNA
ttgtttatgttgataccttt

SEQ ID NO: 74759 - DNA, 20 bp, synthetic construct
  misc_feature 1..20: note = Description of Artificial Sequence: Synthetic oligonucleotide
  misc_feature 1..20: note = Target: SCN10A; (+) strand; PAM type: YTN; PAM sequence: TTT
  source 1..20: mol_type = other DNA
tgtttatgttgatacctttt

SEQ ID NO: 74760 - DNA, 20 bp, synthetic construct
  misc_feature 1..20: note = Description of Artificial Sequence: Synthetic oligonucleotide
  misc_feature 1..20: note = Target: SCN10A; (+) strand; PAM type: YTN; PAM sequence: TTT
  source 1..20: mol_type = other DNA
gtttatgttgataccttttt

SEQ ID NO: 74761 - DNA, 20 bp, synthetic construct
  misc_feature 1..20: note = Description of Artificial Sequence: Synthetic oligonucleotide
  misc_feature 1..20: note = Target: SCN10A; (+) strand; PAM type: YTN; PAM sequence: TTG
  source 1..20: mol_type = other DNA
tttatgttgatacctttttg

SEQ ID NO: 74762 - DNA, 20 bp, synthetic construct
  misc_feature 1..20: note = Description of Artificial Sequence: Synthetic oligonucleotide
  misc_feature 1..20: note = Target: SCN10A; (+) strand; PAM type: YTN; PAM sequence: TTT
  source 1..20: mol_type = other DNA
atgttgatacctttttgttt

SEQ ID NO: 74763 - DNA, 20 bp, synthetic construct
  misc_feature 1..20: note = Description of Artificial Sequence: Synthetic oligonucleotide
  misc_feature 1..20: note = Target: SCN10A; (+) strand; PAM type: YTN; PAM sequence: TTA
  source 1..20: mol_type = other DNA
tgttgatacctttttgttta

SEQ ID NO: 74764 - DNA, 20 bp, synthetic construct
  misc_feature 1..20: note = Description of Artificial Sequence: Synthetic oligonucleotide
  misc_feature 1..20: note = Target: SCN10A; (+) strand; PAM type: YTN; PAM sequence: TTG
  source 1..20: mol_type = other DNA
atacctttttgtttatgcca

SEQ ID NO: 74765 - DNA, 20 bp, synthetic construct
  misc_feature 1..20: note = Description of Artificial Sequence: Synthetic oligonucleotide
  misc_feature 1..20: note = Target: SCN10A; (+) strand; PAM type: YTN; PAM sequence: CTT
  source 1..20: mol_type = other DNA
tttgtttatgccagatatat

SEQ ID NO: 74766 - DNA, 20 bp, synthetic construct
  misc_feature 1..20: note = Description of Artificial Sequence: Synthetic oligonucleotide
  misc_feature 1..20: note = Target: SCN10A; (+) strand; PAM type: YTN; PAM sequence: TTT
  source 1..20: mol_type = other DNA
ttgtttatgccagatatatg

SEQ ID NO: 74767 - DNA, 20 bp, synthetic construct
  misc_feature 1..20: note = Description of Artificial Sequence: Synthetic oligonucleotide
  misc_feature 1..20: note = Target: SCN10A; (+) strand; PAM type: YTN; PAM sequence: TTT
  source 1..20: mol_type = other DNA
tgtttatgccagatatatgt

SEQ ID NO: 74768 - DNA, 20 bp, synthetic construct
  misc_feature 1..20: note = Description of Artificial Sequence: Synthetic oligonucleotide
  misc_feature 1..20: note = Target: SCN10A; (+) strand; PAM type: YTN; PAM sequence: TTT
  source 1..20: mol_type = other DNA
gtttatgccagatatatgta

SEQ ID NO: 74769 - DNA, 20 bp, synthetic construct
  misc_feature 1..20: note = Description of Artificial Sequence: Synthetic oligonucleotide
  misc_feature 1..20: note = Target: SCN10A; (+) strand; PAM type: YTN; PAM sequence: TTG
  source 1..20: mol_type = other DNA
tttatgccagatatatgtat

SEQ ID NO: 74770 - DNA, 20 bp, synthetic construct
  misc_feature 1..20: note = Description of Artificial Sequence: Synthetic oligonucleotide
  misc_feature 1..20: note = Target: SCN10A; (+) strand; PAM type: YTN; PAM sequence: TTT
  source 1..20: mol_type = other DNA
atgccagatatatgtatatc

SEQ ID NO: 74771 - DNA, 20 bp, synthetic construct
  misc_feature 1..20: note = Description of Artificial Sequence: Synthetic oligonucleotide
  misc_feature 1..20: note = Target: SCN10A; (+) strand; PAM type: YTN; PAM sequence: TTA
  source 1..20: mol_type = other DNA
tgccagatatatgtatatca

SEQ ID NO: 74772 - DNA, 20 bp, synthetic construct
  misc_feature 1..20: note = Description of Artificial Sequence: Synthetic oligonucleotide
  misc_feature 1..20: note = Target: SCN10A; (+) strand; PAM type: YTN; PAM sequence: TTA
  source 1..20: mol_type = other DNA
gaaattaatatatatgtata

SEQ ID NO: 74773 - DNA, 20 bp, synthetic construct
  misc_feature 1..20: note = Description of Artificial Sequence: Synthetic oligonucleotide
  misc_feature 1..20: note = Target: SCN10A; (+) strand; PAM type: YTN; PAM sequence: TTA
  source 1..20: mol_type = other DNA
atatatatgtatatatgctt

SEQ ID NO: 74774 - DNA, 20 bp, synthetic construct
  misc_feature 1..20: note = Description of Artificial Sequence: Synthetic oligonucleotide
  misc_feature 1..20: note = Target: SCN10A; (+) strand; PAM type: YTN; PAM sequence: CTT
  source 1..20: mol_type = other DNA
atatacctatatatacataa

SEQ ID NO: 74775 - DNA, 20 bp, synthetic construct
  misc_feature 1..20: note = Description of Artificial Sequence: Synthetic oligonucleotide
  misc_feature 1..20: note = Target: SCN10A; (+) strand; PAM type: YTN; PAM sequence: TTA
  source 1..20: mol_type = other DNA
tatacctatatatacataac

SEQ ID NO: 74776 - DNA, 20 bp, synthetic construct
  misc_feature 1..20: note = Description of Artificial Sequence: Synthetic oligonucleotide
  misc_feature 1..20: note = Target: SCN10A; (+) strand; PAM type: YTN; PAM sequence: CTA
  source 1..20: mol_type = other DNA
tatatacataactagctaca

SEQ ID NO: 74777 - DNA, 20 bp, synthetic construct
  misc_feature 1..20: note = Description of Artificial Sequence: Synthetic oligonucleotide
  misc_feature 1..20: note = Target: SCN10A; (+) strand; PAM type: YTN; PAM sequence: CTA
  source 1..20: mol_type = other DNA
gctacatggtctagttgtat

SEQ ID NO: 74778 - DNA, 20 bp, synthetic construct
  misc_feature 1..20: note = Description of Artificial Sequence: Synthetic oligonucleotide
  misc_feature 1..20: note = Target: SCN10A; (+) strand; PAM type: YTN; PAM sequence: CTA
  source 1..20: mol_type = other DNA
catggtctagttgtatgtat

SEQ ID NO: 74779 - DNA, 20 bp, synthetic construct
  misc_feature 1..20: note = Description of Artificial Sequence: Synthetic oligonucleotide
  misc_feature 1..20: note = Target: SCN10A; (+) strand; PAM type: YTN; PAM sequence: CTA
  source 1..20: mol_type = other DNA
gttgtatgtatatacatagt

SEQ ID NO: 74780 - DNA, 20 bp, synthetic construct
  misc_feature 1..20: note = Description of Artificial Sequence: Synthetic oligonucleotide
  misc_feature 1..20: note = Target: SCN10A; (+) strand; PAM type: YTN; PAM sequence: TTG
  source 1..20: mol_type = other DNA
tatgtatatacatagttgta

SEQ ID NO: 74781 - DNA, 20 bp, synthetic construct
  misc_feature 1..20: note = Description of Artificial Sequence: Synthetic oligonucleotide
  misc_feature 1..20: note = Target: SCN10A; (+) strand; PAM type: YTN; PAM sequence: TTG
  source 1..20: mol_type = other DNA
tatgtatatatatagtgtat

SEQ ID NO: 74782 - DNA, 20 bp, synthetic construct
  misc_feature 1..20: note = Description of Artificial Sequence: Synthetic oligonucleotide
  misc_feature 1..20: note = Target: SCN10A; (+) strand; PAM type: YTN; PAM sequence: CTC
  source 1..20: mol_type = other DNA
atattagaaattcaaaactc

SEQ ID NO: 74783 - DNA, 20 bp, synthetic construct
  misc_feature 1..20: note = Description of Artificial Sequence: Synthetic oligonucleotide
  misc_feature 1..20: note = Target: SCN10A; (+) strand; PAM type: YTN; PAM sequence: TTA
  source 1..20: mol_type = other DNA
gaaattcaaaactcaggaaa

SEQ ID NO: 74784 - DNA, 20 bp, synthetic construct
  misc_feature 1..20: note = Description of Artificial Sequence: Synthetic oligonucleotide
  misc_feature 1..20: note = Target: SCN10A; (+) strand; PAM type: YTN; PAM sequence: TTC
  source 1..20: mol_type = other DNA
aaaactcaggaaattttaaa

SEQ ID NO: 74785 - DNA, 20 bp, synthetic construct
  misc_feature 1..20: note = Description of Artificial Sequence: Synthetic oligonucleotide
  misc_feature 1..20: note = Target: SCN10A; (+) strand; PAM type: YTN; PAM sequence: CTC
  source 1..20: mol_type = other DNA
aggaaattttaaaacacggg

SEQ ID NO: 74786 - DNA, 20 bp, synthetic construct
  misc_feature 1..20: note = Description of Artificial Sequence: Synthetic oligonucleotide
  misc_feature 1..20: note = Target: SCN10A; (+) strand; PAM type: YTN; PAM sequence: TTT
  source 1..20: mol_type = other DNA
taaaacacgggaatatacag

SEQ ID NO: 74787 - DNA, 20 bp, synthetic construct
  misc_feature 1..20: note = Description of Artificial Sequence: Synthetic oligonucleotide
  misc_feature 1..20: note = Target: SCN10A; (+) strand; PAM type: YTN; PAM sequence: TTT
  source 1..20: mol_type = other DNA
aaaacacgggaatatacagg

SEQ ID NO: 74788 - DNA, 20 bp, synthetic construct
  misc_feature 1..20: note = Description of Artificial Sequence: Synthetic oligonucleotide
  misc_feature 1..20: note = Target: SCN10A; (+) strand; PAM type: YTN; PAM sequence: TTA
  source 1..20: mol_type = other DNA
aaacacgggaatatacaggc

SEQ ID NO: 74789 - DNA, 20 bp, synthetic construct
  misc_feature 1..20: note = Description of Artificial Sequence: Synthetic oligonucleotide
  misc_feature 1..20: note = Target: SCN10A; (+) strand; PAM type: YTN; PAM sequence: TTC
  source 1..20: mol_type = other DNA
cagtagcttttagagtgatg

SEQ ID NO: 74790 - DNA, 20 bp, synthetic construct
  misc_feature 1..20: note = Description of Artificial Sequence: Synthetic oligonucleotide
  misc_feature 1..20: note = Target: SCN10A; (+) strand; PAM type: YTN; PAM sequence: CTT
  source 1..20: mol_type = other DNA
ttagagtgatgacatcatcc

SEQ ID NO: 74791 - DNA, 20 bp, synthetic construct
  misc_feature 1..20: note = Description of Artificial Sequence: Synthetic oligonucleotide
  misc_feature 1..20: note = Target: SCN10A; (+) strand; PAM type: YTN; PAM sequence: TTT
  source 1..20: mol_type = other DNA
tagagtgatgacatcatccc

SEQ ID NO: 74792 - DNA, 20 bp, synthetic construct
  misc_feature 1..20: note = Description of Artificial Sequence: Synthetic oligonucleotide
  misc_feature 1..20: note = Target: SCN10A; (+) strand; PAM type: YTN; PAM sequence: TTT
  source 1..20: mol_type = other DNA
agagtgatgacatcatcccc

SEQ ID NO: 74793 - DNA, 20 bp, synthetic construct
  misc_feature 1..20: note = Description of Artificial Sequence: Synthetic oligonucleotide
  misc_feature 1..20: note = Target: SCN10A; (+) strand; PAM type: YTN; PAM sequence: TTA
  source 1..20: mol_type = other DNA
gagtgatgacatcatccccc

SEQ ID NO: 74794 - DNA, 20 bp, synthetic construct
  misc_feature 1..20: note = Description of Artificial Sequence: Synthetic oligonucleotide
  misc_feature 1..20: note = Target: SCN10A; (+) strand; PAM type: YTN; PAM sequence: CTC
  source 1..20: mol_type = other DNA
tatattcaccaatgtatgat

SEQ ID NO: 74795 - DNA, 20 bp, synthetic construct
  misc_feature 1..20: note = Description of Artificial Sequence: Synthetic oligonucleotide
  misc_feature 1..20: note = Target: SCN10A; (+) strand; PAM type: YTN; PAM sequence: CTA
  source 1..20: mol_type = other DNA
tattcaccaatgtatgatca

SEQ ID NO: 74796 - DNA, 20 bp, synthetic construct
  misc_feature 1..20: note = Description of Artificial Sequence: Synthetic oligonucleotide
  misc_feature 1..20: note = Target: SCN10A; (+) strand; PAM type: YTN; PAM sequence: TTC
  source 1..20: mol_type = other DNA
accaatgtatgatcataaga

SEQ ID NO: 74797 - DNA, 20 bp, synthetic construct
  misc_feature 1..20: note = Description of Artificial Sequence: Synthetic oligonucleotide
  misc_feature 1..20: note = Target: SCN10A; (+) strand; PAM type: YTN; PAM sequence: TTA
  source 1..20: mol_type = other DNA
catccaagtattgttataca

SEQ ID NO: 74798 - DNA, 20 bp, synthetic construct
  misc_feature 1..20: note = Description of Artificial Sequence: Synthetic oligonucleotide
  misc_feature 1..20: note = Target: SCN10A; (+) strand; PAM type: YTN; PAM sequence: TTG
  source 1..20: mol_type = other DNA
ttatacaatagttttcattt

SEQ ID NO: 74799 - DNA, 20 bp, synthetic construct
  misc_feature 1..20: note = Description of Artificial Sequence: Synthetic oligonucleotide
  misc_feature 1..20: note = Target: SCN10A; (+) strand; PAM type: YTN; PAM sequence: TTA
  source 1..20: mol_type = other DNA
tacaatagttttcattttat

SEQ ID NO: 74800 - DNA, 20 bp, synthetic construct
  misc_feature 1..20: note = Description of Artificial Sequence: Synthetic oligonucleotide
  misc_feature 1..20: note = Target: SCN10A; (+) strand; PAM type: YTN; PAM sequence: TTT
  source 1..20: mol_type = other DNA
tcattttataaacccactaa

SEQ ID NO: 74801 - DNA, 20 bp, synthetic construct
  misc_feature 1..20: note = Description of Artificial Sequence: Synthetic oligonucleotide
  misc_feature 1..20: note = Target: SCN10A; (+) strand; PAM type: YTN; PAM sequence: TTT
  source 1..20: mol_type = other DNA
cattttataaacccactaaa

SEQ ID NO: 74802 - DNA, 20 bp, synthetic construct
  misc_feature 1..20: note = Description of Artificial Sequence: Synthetic oligonucleotide
  misc_feature 1..20: note = Target: SCN10A; (+) strand; PAM type: YTN; PAM sequence: TTC
  source 1..20: mol_type = other DNA
attttataaacccactaaaa

SEQ ID NO: 74803 - DNA, 20 bp, synthetic construct
  misc_feature 1..20: note = Description of Artificial Sequence: Synthetic oligonucleotide
  misc_feature 1..20: note = Target: SCN10A; (+) strand; PAM type: YTN; PAM sequence: TTT
  source 1..20: mol_type = other DNA
tataaacccactaaaacagt

SEQ ID NO: 74804 - DNA, 20 bp, synthetic construct
  misc_feature 1..20: note = Description of Artificial Sequence: Synthetic oligonucleotide
  misc_feature 1..20: note = Target: SCN10A; (+) strand; PAM type: YTN; PAM sequence: TTT
  source 1..20: mol_type = other DNA
ataaacccactaaaacagtt

SEQ ID NO: 74805 - DNA, 20 bp, synthetic construct
  misc_feature 1..20: note = Description of Artificial Sequence: Synthetic oligonucleotide
  misc_feature 1..20: note = Target: SCN10A; (+) strand; PAM type: YTN; PAM sequence: TTA
  source 1..20: mol_type = other DNA
taaacccactaaaacagttt

SEQ ID NO: 74806 - DNA, 20 bp, synthetic construct
  misc_feature 1..20: note = Description of Artificial Sequence: Synthetic oligonucleotide
  misc_feature 1..20: note = Target: SCN10A; (+) strand; PAM type: YTN; PAM sequence: CTA
  source 1..20: mol_type = other DNA
aaacagttttggggacacca

SEQ ID NO: 74807 - DNA, 20 bp, synthetic construct
  misc_feature 1..20: note = Description of Artificial Sequence: Synthetic oligonucleotide
  misc_feature 1..20: note = Target: SCN10A; (+) strand; PAM type: YTN; PAM sequence: TTT
  source 1..20: mol_type = other DNA
tggggacaccaggggttcca

SEQ ID NO: 74808 - DNA, 20 bp, synthetic construct
  misc_feature 1..20: note = Description of Artificial Sequence: Synthetic oligonucleotide
  misc_feature 1..20: note = Target: SCN10A; (+) strand; PAM type: YTN; PAM sequence: TTT
  source 1..20: mol_type = other DNA
ggggacaccaggggttccaa

SEQ ID NO: 74809 - DNA, 20 bp, synthetic construct
  misc_feature 1..20: note = Description of Artificial Sequence: Synthetic oligonucleotide
  misc_feature 1..20: note = Target: SCN10A; (+) strand; PAM type: YTN; PAM sequence: TTG
  source 1..20: mol_type = other DNA
gggacaccaggggttccaag

SEQ ID NO: 74810 - DNA, 20 bp, synthetic construct
  misc_feature 1..20: note = Description of Artificial Sequence: Synthetic oligonucleotide
  misc_feature 1..20: note = Target: SCN10A; (+) strand; PAM type: YTN; PAM sequence: TTC
  source 1..20: mol_type = other DNA
caagatcatagttgaggacc

SEQ ID NO: 74811 - DNA, 20 bp, synthetic construct
  misc_feature 1..20: note = Description of Artificial Sequence: Synthetic oligonucleotide
  misc_feature 1..20: note = Target: SCN10A; (+) strand; PAM type: YTN; PAM sequence: TTG
  source 1..20: mol_type = other DNA
aggaccactggcttaaattc

SEQ ID NO: 74812 - DNA, 20 bp, synthetic construct
  misc_feature 1..20: note = Description of Artificial Sequence: Synthetic oligonucleotide
  misc_feature 1..20: note = Target: SCN10A; (+) strand; PAM type: YTN; PAM sequence: CTG
  source 1..20: mol_type = other DNA
gcttaaattcatcctgcttt

SEQ ID NO: 74813 - DNA, 20 bp, synthetic construct
  misc_feature 1..20: note = Description of Artificial Sequence: Synthetic oligonucleotide
  misc_feature 1..20: note = Target: SCN10A; (+) strand; PAM type: YTN; PAM sequence: CTT
  source 1..20: mol_type = other DNA
aaattcatcctgctttctgt

SEQ ID NO: 74814 - DNA, 20 bp, synthetic construct
  misc_feature 1..20: note = Description of Artificial Sequence: Synthetic oligonucleotide
  misc_feature 1..20: note = Target: SCN10A; (+) strand; PAM type: YTN; PAM sequence: TTA
  source 1..20: mol_type = other DNA
aattcatcctgctttctgtc

SEQ ID NO: 74815 - DNA, 20 bp, synthetic construct
  misc_feature 1..20: note = Description of Artificial Sequence: Synthetic oligonucleotide
  misc_feature 1..20: note = Target: SCN10A; (+) strand; PAM type: YTN; PAM sequence: TTC
  source 1..20: mol_type = other DNA
atcctgctttctgtcctcac

SEQ ID NO: 74816 - DNA, 20 bp, synthetic construct
  misc_feature 1..20: note = Description of Artificial Sequence: Synthetic oligonucleotide
  misc_feature 1..20: note = Target: SCN10A; (+) strand; PAM type: YTN; PAM sequence: CTG
  source 1..20: mol_type = other DNA
ctttctgtcctcaccgccat

SEQ ID NO: 74817 - DNA, 20 bp, synthetic construct
  misc_feature 1..20: note = Description of Artificial Sequence: Synthetic oligonucleotide
  misc_feature 1..20: note = Target: SCN10A; (+) strand; PAM type: YTN; PAM sequence: CTT
  source 1..20: mol_type = other DNA
tctgtcctcaccgccatgct

SEQ ID NO: 74818 - DNA, 20 bp, synthetic construct
  misc_feature 1..20: note = Description of Artificial Sequence: Synthetic oligonucleotide
  misc_feature 1..20: note = Target: SCN10A; (+) strand; PAM type: YTN; PAM sequence: TTT
  source 1..20: mol_type = other DNA
ctgtcctcaccgccatgctc

SEQ ID NO: 74819 - DNA, 20 bp, synthetic construct
  misc_feature 1..20: note = Description of Artificial Sequence: Synthetic oligonucleotide
  misc_feature 1..20: note = Target: SCN10A; (+) strand; PAM type: YTN; PAM sequence: TTC
  source 1..20: mol_type = other DNA
tgtcctcaccgccatgctcc

SEQ ID NO: 74820 - DNA, 20 bp, synthetic construct
  misc_feature 1..20: note = Description of Artificial Sequence: Synthetic oligonucleotide
  misc_feature 1..20: note = Target: SCN10A; (+) strand; PAM type: YTN; PAM sequence: CTG
  source 1..20: mol_type = other DNA
tcctcaccgccatgctcctc

SEQ ID NO: 74821 - DNA, 20 bp, synthetic construct
  misc_feature 1..20: note = Description of Artificial Sequence: Synthetic oligonucleotide
  misc_feature 1..20: note = Target: SCN10A; (+) strand; PAM type: YTN; PAM sequence: CTC
  source 1..20: mol_type = other DNA
accgccatgctcctccccca

SEQ ID NO: 74822 - DNA, 20 bp, synthetic construct
  misc_feature 1..20: note = Description of Artificial Sequence: Synthetic oligonucleotide
  misc_feature 1..20: note = Target: SCN10A; (+) strand; PAM type: YTN; PAM sequence: CTC
  source 1..20: mol_type = other DNA
ctcccccaacctcaagatgt

SEQ ID NO: 74823 - DNA, 20 bp, synthetic construct
  misc_feature 1..20: note = Description of Artificial Sequence: Synthetic oligonucleotide
  misc_feature 1..20: note = Target: SCN10A; (+) strand; PAM type: YTN; PAM sequence: CTC
  source 1..20: mol_type = other DNA
ccccaacctcaagatgtctg

SEQ ID NO: 74824 - DNA, 20 bp, synthetic construct
  misc_feature 1..20: note = Description of Artificial Sequence: Synthetic oligonucleotide
  misc_feature 1..20: note = Target: SCN10A; (+) strand; PAM type: YTN; PAM sequence: CTC
  source 1..20: mol_type = other DNA
aagatgtctgctctccacct

SEQ ID NO: 74825 - DNA, 20 bp, synthetic construct
  misc_feature 1..20: note = Description of Artificial Sequence: Synthetic oligonucleotide
  misc_feature 1..20: note = Target: SCN10A; (+) strand; PAM type: YTN; PAM sequence: CTG
  source 1..20: mol_type = other DNA
ctctccacctgcaaagagac

SEQ ID NO: 74826 - DNA, 20 bp, synthetic construct
  misc_feature 1..20: note = Description of Artificial Sequence: Synthetic oligonucleotide
  misc_feature 1..20: note = Target: SCN10A; (+) strand; PAM type: YTN; PAM sequence: CTC
  source 1..20: mol_type = other DNA
tccacctgcaaagagaccca

SEQ ID NO: 74827 - DNA, 20 bp, synthetic construct
  misc_feature 1..20: note = Description of Artificial Sequence: Synthetic oligonucleotide
  misc_feature 1..20: note = Target: SCN10A; (+) strand; PAM type: YTN; PAM sequence: CTC
  source 1..20: mol_type = other DNA
cacctgcaaagagacccaac

SEQ ID NO: 74828 - DNA, 20 bp, synthetic construct
  misc_feature 1..20: note = Description of Artificial Sequence: Synthetic oligonucleotide
  misc_feature 1..20: note = Target: SCN10A; (+) strand; PAM type: YTN; PAM sequence: CTG
  source 1..20: mol_type = other DNA
caaagagacccaactcctct

SEQ ID NO: 74829 - DNA, 20 bp, synthetic construct
  misc_feature 1..20: note = Description of Artificial Sequence: Synthetic oligonucleotide
  misc_feature 1..20: note = Target: SCN10A; (+) strand; PAM type: YTN; PAM sequence: CTC
  source 1..20: mol_type = other DNA
ctctggaggccccaggccag

SEQ ID NO: 74830 - DNA, 20 bp, synthetic construct
  misc_feature 1..20: note = Description of Artificial Sequence: Synthetic oligonucleotide
  misc_feature 1..20: note = Target: SCN10A; (+) strand; PAM type: YTN; PAM sequence: CTC
  source 1..20: mol_type = other DNA
tggaggccccaggccagagg

SEQ ID NO: 74831 - DNA, 20 bp, synthetic construct
  misc_feature 1..20: note = Description of Artificial Sequence: Synthetic oligonucleotide
  misc_feature 1..20: note = Target: SCN10A; (+) strand; PAM type: YTN; PAM sequence: CTG
  source 1..20: mol_type = other DNA
gaggccccaggccagaggtc

SEQ ID NO: 74832 - DNA, 20 bp, synthetic construct
  misc_feature 1..20: note = Description of Artificial Sequence: Synthetic oligonucleotide
  misc_feature 1..20: note = Target: SCN10A; (+) strand; PAM type: YTN; PAM sequence: CTT
  source 1..20: mol_type = other DNA
tccctgaaagctctgcagca

SEQ ID NO: 74833 - DNA, 20 bp, synthetic construct
  misc_feature 1..20: note = Description of Artificial Sequence: Synthetic oligonucleotide
  misc_feature 1..20: note = Target: SCN10A; (+) strand; PAM type: YTN; PAM sequence: TTT
  source 1..20: mol_type = other DNA
ccctgaaagctctgcagcag

SEQ ID NO: 74834 - DNA, 20 bp, synthetic construct
  misc_feature 1..20: note = Description of Artificial Sequence: Synthetic oligonucleotide
  misc_feature 1..20: note = Target: SCN10A; (+) strand; PAM type: YTN; PAM sequence: TTC
  source 1..20: mol_type = other DNA
cctgaaagctctgcagcagt

SEQ ID NO: 74835 - DNA, 20 bp, synthetic construct
  misc_feature 1..20: note = Description of Artificial Sequence: Synthetic oligonucleotide
  misc_feature 1..20: note = Target: SCN10A; (+) strand; PAM type: YTN; PAM sequence: CTG
  source 1..20: mol_type = other DNA
aaagctctgcagcagttatc

SEQ ID NO: 74836 - DNA, 20 bp, synthetic construct
  misc_feature 1..20: note = Description of Artificial Sequence: Synthetic oligonucleotide
  misc_feature 1..20: note = Target: SCN10A; (+) strand; PAM type: YTN; PAM sequence: CTC
  source 1..20: mol_type = other DNA
tgcagcagttatctgctttt

SEQ ID NO: 74837 - DNA, 20 bp, synthetic construct
  misc_feature 1..20: note = Description of Artificial Sequence: Synthetic oligonucleotide
  misc_feature 1..20: note = Target: SCN10A; (+) strand; PAM type: YTN; PAM sequence: CTG
  source 1..20: mol_type = other DNA
cagcagttatctgcttttga

SEQ ID NO: 74838 - DNA, 20 bp, synthetic construct
  misc_feature 1..20: note = Description of Artificial Sequence: Synthetic oligonucleotide
  misc_feature 1..20: note = Target: SCN10A; (+) strand; PAM type: YTN; PAM sequence: TTA
  source 1..20: mol_type = other DNA
tctgcttttgaagatgtggg

SEQ ID NO: 74839 - DNA, 20 bp, synthetic construct
  misc_feature 1..20: note = Description of Artificial Sequence: Synthetic oligonucleotide
  misc_feature 1..20: note = Target: SCN10A; (+) strand; PAM type: YTN; PAM sequence: CTG
  source 1..20: mol_type = other DNA
cttttgaagatgtgggttta

SEQ ID NO: 74840 - DNA, 20 bp, synthetic construct
  misc_feature 1..20: note = Description of Artificial Sequence: Synthetic oligonucleotide
  misc_feature 1..20: note = Target: SCN10A; (+) strand; PAM type: YTN; PAM sequence: CTT
  source 1..20: mol_type = other DNA
ttgaagatgtgggtttagtt

SEQ ID NO: 74841 - DNA, 20 bp, synthetic construct
  misc_feature 1..20: note = Description of Artificial Sequence: Synthetic oligonucleotide
  misc_feature 1..20: note = Target: SCN10A; (+) strand; PAM type: YTN; PAM sequence: TTT
  source 1..20: mol_type = other DNA
tgaagatgtgggtttagtta

SEQ ID NO: 74842 - DNA, 20 bp, synthetic construct
  misc_feature 1..20: note = Description of Artificial Sequence: Synthetic oligonucleotide
  misc_feature 1..20: note = Target: SCN10A; (+) strand; PAM type: YTN; PAM sequence: TTT
  source 1..20: mol_type = other DNA
gaagatgtgggtttagttag

SEQ ID NO: 74843 - DNA, 20 bp, synthetic construct
  misc_feature 1..20: note = Description of Artificial Sequence: Synthetic oligonucleotide
  misc_feature 1..20: note = Target: SCN10A; (+) strand; PAM type: YTN; PAM sequence: TTG
  source 1..20: mol_type = other DNA
aagatgtgggtttagttagt

SEQ ID NO: 74844 - DNA, 20 bp, synthetic construct
  misc_feature 1..20: note = Description of Artificial Sequence: Synthetic oligonucleotide
  misc_feature 1..20: note = Target: SCN10A; (+) strand; PAM type: YTN; PAM sequence: TTT
  source 1..20: mol_type = other DNA
agttagtttctatcataaat

SEQ ID NO: 74845 - DNA, 20 bp, synthetic construct
  misc_feature 1..20: note = Description of Artificial Sequence: Synthetic oligonucleotide
  misc_feature 1..20: note = Target: SCN10A; (+) strand; PAM type: YTN; PAM sequence: TTA
  source 1..20: mol_type = other DNA
gttagtttctatcataaatg

SEQ ID NO: 74846 - DNA, 20 bp, synthetic construct
  misc_feature 1..20: note = Description of Artificial Sequence: Synthetic oligonucleotide
  misc_feature 1..20: note = Target: SCN10A; (+) strand; PAM type: YTN; PAM sequence: TTA
  source 1..20: mol_type = other DNA
gtttctatcataaatgtcat

SEQ ID NO: 74847 - DNA, 20 bp, synthetic construct
  misc_feature 1..20: note = Description of Artificial Sequence: Synthetic oligonucleotide
  misc_feature 1..20: note = Target: SCN10A; (+) strand; PAM type: YTN; PAM sequence: TTT
  source 1..20: mol_type = other DNA
ctatcataaatgtcataaaa

SEQ ID NO: 74848 - DNA, 20 bp, synthetic construct
  misc_feature 1..20: note = Description of Artificial Sequence: Synthetic oligonucleotide
  misc_feature 1..20: note = Target: SCN10A; (+) strand; PAM type: YTN; PAM sequence: TTC
  source 1..20: mol_type = other DNA
tatcataaatgtcataaaaa

SEQ ID NO: 74849 - DNA, 20 bp, synthetic construct
  misc_feature 1..20: note = Description of Artificial Sequence: Synthetic oligonucleotide
  misc_feature 1..20: note = Target: SCN10A; (+) strand; PAM type: YTN; PAM sequence: CTA
  source 1..20: mol_type = other DNA
tcataaatgtcataaaaatt

SEQ ID NO: 74850 - DNA, 20 bp, synthetic construct
  misc_feature 1..20: note = Description of Artificial Sequence: Synthetic oligonucleotide
  misc_feature 1..20: note = Target: SCN10A; (+) strand; PAM type: YTN; PAM sequence: TTC
  source 1..20: mol_type = other DNA
aaagagatcatcaaataagt

SEQ ID NO: 74851 - DNA, 20 bp, synthetic construct
  misc_feature 1..20: note = Description of Artificial Sequence: Synthetic oligonucleotide
  misc_feature 1..20: note = Target: SCN10A; (+) strand; PAM type: YTN; PAM sequence: TTA
  source 1..20: mol_type = other DNA
gagatatatatatatatttt

SEQ ID NO: 74852 - DNA, 20 bp, synthetic construct
  misc_feature 1..20: note = Description of Artificial Sequence: Synthetic oligonucleotide
  misc_feature 1..20: note = Target: SCN10A; (+) strand; PAM type: YTN; PAM sequence: TTT
  source 1..20: mol_type = other DNA
tttttggttgttaacggaat

SEQ ID NO: 74853 - DNA, 20 bp, synthetic construct
  misc_feature 1..20: note = Description of Artificial Sequence: Synthetic oligonucleotide
  misc_feature 1..20: note = Target: SCN10A; (+) strand; PAM type: YTN; PAM sequence: TTT
  source 1..20: mol_type = other DNA
ttttggttgttaacggaatc

SEQ ID NO: 74854 - DNA, 20 bp, synthetic construct
  misc_feature 1..20: note = Description of Artificial Sequence: Synthetic oligonucleotide
  misc_feature 1..20: note = Target: SCN10A; (+) strand; PAM type: YTN; PAM sequence: TTT
  source 1..20: mol_type = other DNA
tttggttgttaacggaatct

SEQ ID NO: 74855 - DNA, 20 bp, synthetic construct
  misc_feature 1..20: note = Description of Artificial Sequence: Synthetic oligonucleotide
  misc_feature 1..20: note = Target: SCN10A; (+) strand; PAM type: YTN; PAM sequence: TTT
  source 1..20: mol_type = other DNA
ttggttgttaacggaatctt

SEQ ID NO: 74856 - DNA, 20 bp, synthetic construct
  misc_feature 1..20: note = Description of Artificial Sequence: Synthetic oligonucleotide
  misc_feature 1..20: note = Target: SCN10A; (+) strand; PAM type: YTN; PAM sequence: TTT
  source 1..20: mol_type = other DNA
tggttgttaacggaatcttt

SEQ ID NO: 74857 - DNA, 20 bp, synthetic construct
  misc_feature 1..20: note = Description of Artificial Sequence: Synthetic oligonucleotide
  misc_feature 1..20: note = Target: SCN10A; (+) strand; PAM type: YTN; PAM sequence: TTT
  source 1..20: mol_type = other DNA
ggttgttaacggaatcttta

SEQ ID NO: 74858 - DNA, 20 bp, synthetic construct
  misc_feature 1..20: note = Description of Artificial Sequence: Synthetic oligonucleotide
  misc_feature 1..20: note = Target: SCN10A; (+) strand; PAM type: YTN; PAM sequence: TTG
  source 1..20: mol_type = other DNA
gttgttaacggaatctttag

SEQ ID NO: 74859 - DNA, 20 bp, synthetic construct
  misc_feature 1..20: note = Description of Artificial Sequence: Synthetic oligonucleotide
  misc_feature 1..20: note = Target: SCN10A; (+) strand; PAM type: YTN; PAM sequence: TTG
  source 1..20: mol_type = other DNA
ttaacggaatctttagcaga

SEQ ID NO: 74860 - DNA, 20 bp, synthetic construct
  misc_feature 1..20: note = Description of Artificial Sequence: Synthetic oligonucleotide
  misc_feature 1..20: note = Target: SCN10A; (+) strand; PAM type: YTN; PAM sequence: TTA
  source 1..20: mol_type = other DNA
acggaatctttagcagactg

SEQ ID NO: 74861 - DNA, 20 bp, synthetic construct
  misc_feature 1..20: note = Description of Artificial Sequence: Synthetic oligonucleotide
  misc_feature 1..20: note = Target: SCN10A; (+) strand; PAM type: YTN; PAM sequence: CTT
  source 1..20: mol_type = other DNA
tagcagactgccacatcacc

SEQ ID NO: 74862 - DNA, 20 bp, synthetic construct
  misc_feature 1..20: note = Description of Artificial Sequence: Synthetic oligonucleotide
  misc_feature 1..20: note = Target: SCN10A; (+) strand; PAM type: YTN; PAM sequence: TTT
  source 1..20: mol_type = other DNA
agcagactgccacatcaccc

SEQ ID NO: 74863 - DNA, 20 bp, synthetic construct
  misc_feature 1..20: note = Description of Artificial Sequence: Synthetic oligonucleotide
  misc_feature 1..20: note = Target: SCN10A; (+) strand; PAM type: YTN; PAM sequence: TTA
  source 1..20: mol_type = other DNA
gcagactgccacatcaccca

SEQ ID NO: 74864 - DNA, 20 bp, synthetic construct
  misc_feature 1..20: note = Description of Artificial Sequence: Synthetic oligonucleotide
  misc_feature 1..20: note = Target: SCN10A; (+) strand; PAM type: YTN; PAM sequence: CTG
  source 1..20: mol_type = other DNA
ccacatcacccagggccaag

SEQ ID NO: 74865 - DNA, 20 bp, synthetic construct
  misc_feature 1..20: note = Description of Artificial Sequence: Synthetic oligonucleotide
  misc_feature 1..20: note = Target: SCN10A; (+) strand; PAM type: YTN; PAM sequence: CTT
  source 1..20: mol_type = other DNA
tctgggctgggtgggaccga

SEQ ID NO: 74866 - DNA, 20 bp, synthetic construct
  misc_feature 1..20: note = Description of Artificial Sequence: Synthetic oligonucleotide
  misc_feature 1..20: note = Target: SCN10A; (+) strand; PAM type: YTN; PAM sequence: TTT
  source 1..20: mol_type = other DNA
ctgggctgggtgggaccgag

SEQ ID NO: 74867 - DNA, 20 bp, synthetic construct
  misc_feature 1..20: note = Description of Artificial Sequence: Synthetic oligonucleotide
  misc_feature 1..20: note = Target: SCN10A; (+) strand; PAM type: YTN; PAM sequence: TTC
  source 1..20: mol_type = other DNA
tgggctgggtgggaccgaga

SEQ ID NO: 74868 - DNA, 20 bp, synthetic construct
  misc_feature 1..20: note = Description of Artificial Sequence: Synthetic oligonucleotide
  misc_feature 1..20: note = Target: SCN10A; (+) strand; PAM type: YTN; PAM sequence: CTG
  source 1..20: mol_type = other DNA
ggctgggtgggaccgagact

SEQ ID NO: 74869 - DNA, 20 bp, synthetic construct
  misc_feature 1..20: note = Description of Artificial Sequence: Synthetic oligonucleotide
  misc_feature 1..20: note = Target: SCN10A; (+) strand; PAM type: YTN; PAM sequence: CTG
  source 1..20: mol_type = other DNA
ggtgggaccgagacttcctc

SEQ ID NO: 74870 - DNA, 20 bp, synthetic construct
  misc_feature 1..20: note = Description of Artificial Sequence: Synthetic oligonucleotide
  misc_feature 1..20: note = Target: SCN10A; (+) strand; PAM type: YTN; PAM sequence: CTT
  source 1..20: mol_type = other DNA
cctctccaagagctgagagc

SEQ ID NO: 74871 - DNA, 20 bp, synthetic construct
  misc_feature 1..20: note = Description of Artificial Sequence: Synthetic oligonucleotide
  misc_feature 1..20: note = Target: SCN10A; (+) strand; PAM type: YTN; PAM sequence: TTC
  source 1..20: mol_type = other DNA
ctctccaagagctgagagca

SEQ ID NO: 74872 - DNA, 20 bp, synthetic construct
  misc_feature 1..20: note = Description of Artificial Sequence: Synthetic oligonucleotide
  misc_feature 1..20: note = Target: SCN10A; (+) strand; PAM type: YTN; PAM sequence: CTC
  source 1..20: mol_type = other DNA
tccaagagctgagagcagac

SEQ ID NO: 74873 - DNA, 20 bp, synthetic construct
  misc_feature 1..20: note = Description of Artificial Sequence: Synthetic oligonucleotide
  misc_feature 1..20: note = Target: SCN10A; (+) strand; PAM type: YTN; PAM sequence: CTC
  source 1..20: mol_type = other DNA
caagagctgagagcagacat

SEQ ID NO: 74874 - DNA, 20 bp, synthetic construct
  misc_feature 1..20: note = Description of Artificial Sequence: Synthetic oligonucleotide
  misc_feature 1..20: note = Target: SCN10A; (+) strand; PAM type: YTN; PAM sequence: CTG
  source 1..20: mol_type = other DNA
agagcagacattcctactag

SEQ ID NO: 74875 - DNA, 20 bp, synthetic construct
  misc_feature 1..20: note = Description of Artificial Sequence: Synthetic oligonucleotide
  misc_feature 1..20: note = Target: SCN10A; (+) strand; PAM type: YTN; PAM sequence: TTC
  source 1..20: mol_type = other DNA
ctactagtagctcttacccg

SEQ ID NO: 74876 - DNA, 20 bp, synthetic construct
  misc_feature 1..20: note = Description of Artificial Sequence: Synthetic oligonucleotide
  misc_feature 1..20: note = Target: SCN10A; (+) strand; PAM type: YTN; PAM sequence: CTA
  source 1..20: mol_type = other DNA
ctagtagctcttacccggtg

SEQ ID NO: 74877 - DNA, 20 bp, synthetic construct
  misc_feature 1..20: note = Description of Artificial Sequence: Synthetic oligonucleotide
  misc_feature 1..20: note = Target: SCN10A; (+) strand; PAM type: YTN; PAM sequence: CTA
  source 1..20: mol_type = other DNA
gtagctcttacccggtgtgt

SEQ ID NO: 74878 - DNA, 20 bp, synthetic construct
  misc_feature 1..20: note = Description of Artificial Sequence: Synthetic oligonucleotide
  misc_feature 1..20: note = Target: SCN10A; (+) strand; PAM type: YTN; PAM sequence: CTC
  source 1..20: mol_type = other DNA
ttacccggtgtgtgctgtag

SEQ ID NO: 74879 - DNA, 20 bp, synthetic construct
  misc_feature 1..20: note = Description of Artificial Sequence: Synthetic oligonucleotide
  misc_feature 1..20: note = Target: SCN10A; (+) strand; PAM type: YTN; PAM sequence: CTT
  source 1..20: mol_type = other DNA
acccggtgtgtgctgtagaa

SEQ ID NO: 74880 - DNA, 20 bp, synthetic construct
  misc_feature 1..20: note = Description of Artificial Sequence: Synthetic oligonucleotide
  misc_feature 1..20: note = Target: SCN10A; (+) strand; PAM type: YTN; PAM sequence: TTA
  source 1..20: mol_type = other DNA
cccggtgtgtgctgtagaac

SEQ ID NO: 74881 - DNA, 20 bp, synthetic construct
  misc_feature 1..20: note = Description of Artificial Sequence: Synthetic oligonucleotide
  misc_feature 1..20: note = Target: SCN10A; (+) strand; PAM type: YTN; PAM sequence: CTG
  source 1..20: mol_type = other DNA
tagaacggatctagatcctc

SEQ ID NO: 74882 - DNA, 20 bp, synthetic construct
  misc_feature 1..20: note = Description of Artificial Sequence: Synthetic oligonucleotide
  misc_feature 1..20: note = Target: SCN10A; (+) strand; PAM type: YTN; PAM sequence: CTA
  source 1..20: mol_type = other DNA
gatcctccaggggctccccg

SEQ ID NO: 74883 - DNA, 20 bp, synthetic construct
  misc_feature 1..20: note = Description of Artificial Sequence: Synthetic oligonucleotide
  misc_feature 1..20: note = Target: SCN10A; (+) strand; PAM type: YTN; PAM sequence: CTC
  source 1..20: mol_type = other DNA
caggggctccccgatcagtt

SEQ ID NO: 74884 - DNA, 20 bp, synthetic construct
  misc_feature 1..20: note = Description of Artificial Sequence: Synthetic oligonucleotide
  misc_feature 1..20: note = Target: SCN10A; (+) strand; PAM type: YTN; PAM sequence: CTC
  source 1..20: mol_type = other DNA
cccgatcagttctgctggga

SEQ ID NO: 74885 - DNA, 20 bp, synthetic construct
  misc_feature 1..20: note = Description of Artificial Sequence: Synthetic oligonucleotide
  misc_feature 1..20: note = Target: SCN10A; (+) strand; PAM type: YTN; PAM sequence: TTC
  source 1..20: mol_type = other DNA
tgctgggagctcaccataga

SEQ ID NO: 74886 - DNA, 20 bp, synthetic construct
  misc_feature 1..20: note = Description of Artificial Sequence: Synthetic oligonucleotide
  misc_feature 1..20: note = Target: SCN10A; (+) strand; PAM type: YTN; PAM sequence: CTG
  source 1..20: mol_type = other DNA
ctgggagctcaccatagaac

SEQ ID NO: 74887 - DNA, 20 bp, synthetic construct
  misc_feature 1..20: note = Description of Artificial Sequence: Synthetic oligonucleotide
  misc_feature 1..20: note = Target: SCN10A; (+) strand; PAM type: YTN; PAM sequence: CTG
  source 1..20: mol_type = other DNA
ggagctcaccatagaacttg

SEQ ID NO: 74888 - DNA, 20 bp, synthetic construct
  misc_feature 1..20: note = Description of Artificial Sequence: Synthetic oligonucleotide
  misc_feature 1..20: note = Target: SCN10A; (+) strand; PAM type: YTN; PAM sequence: CTC
  source 1..20: mol_type = other DNA
accatagaacttgggcagct

SEQ ID NO: 74889 - DNA, 20 bp, synthetic construct
  misc_feature 1..20: note = Description of Artificial Sequence: Synthetic oligonucleotide
  misc_feature 1..20: note = Target: SCN10A; (+) strand; PAM type: YTN; PAM sequence: CTT
  source 1..20: mol_type = other DNA
gggcagctggttgcaggctt

SEQ ID NO: 74890 - DNA, 20 bp, synthetic construct
  misc_feature 1..20: note = Description of Artificial Sequence: Synthetic oligonucleotide
  misc_feature 1..20: note = Target: SCN10A; (+) strand; PAM type: YTN; PAM sequence: TTG
  source 1..20: mol_type = other DNA
ggcagctggttgcaggcttt

SEQ ID NO: 74891 - DNA, 20 bp, synthetic construct
  misc_feature 1..20: note = Description of Artificial Sequence: Synthetic oligonucleotide
  misc_feature 1..20: note = Target: SCN10A; (+) strand; PAM type: YTN; PAM sequence: CTG
  source 1..20: mol_type = other DNA
gttgcaggctttcaagtcca

SEQ ID NO: 74892 - DNA, 20 bp, synthetic construct
  misc_feature 1..20: note = Description of Artificial Sequence: Synthetic oligonucleotide
  misc_feature 1..20: note = Target: SCN10A; (+) strand; PAM type: YTN; PAM sequence: TTG
  source 1..20: mol_type = other DNA
caggctttcaagtccagctg

SEQ ID NO: 74893 - DNA, 20 bp, synthetic construct
  misc_feature 1..20: note = Description of Artificial Sequence: Synthetic oligonucleotide
  misc_feature 1..20: note = Target: SCN10A; (+) strand; PAM type: YTN; PAM sequence: CTT
  source 1..20: mol_type = other DNA
tcaagtccagctggggccga

SEQ ID NO: 74894 - DNA, 20 bp, synthetic construct
  misc_feature 1..20: note = Description of Artificial Sequence: Synthetic oligonucleotide
  misc_feature 1..20: note = Target: SCN10A; (+) strand; PAM type: YTN; PAM sequence: TTT
  source 1..20: mol_type = other DNA
caagtccagctggggccgag

SEQ ID NO: 74895 - DNA, 20 bp, synthetic construct
  misc_feature 1..20: note = Description of Artificial Sequence: Synthetic oligonucleotide
  misc_feature 1..20: note = Target: SCN10A; (+) strand; PAM type: YTN; PAM sequence: TTC
  source 1..20: mol_type = other DNA
aagtccagctggggccgagg

SEQ ID NO: 74896 - DNA, 20 bp, synthetic construct
  misc_feature 1..20: note = Description of Artificial Sequence: Synthetic oligonucleotide
  misc_feature 1..20: note = Target: SCN10A; (+) strand; PAM type: YTN; PAM sequence: CTG
  source 1..20: mol_type = other DNA
gggccgaggcttctcttctt

SEQ ID NO: 74897 - DNA, 20 bp, synthetic construct
  misc_feature 1..20: note = Description of Artificial Sequence: Synthetic oligonucleotide
  misc_feature 1..20: note = Target: SCN10A; (+) strand; PAM type: YTN; PAM sequence: CTT
  source 1..20: mol_type = other DNA
ctcttcttggtccttctgct

SEQ ID NO: 74898 - DNA, 20 bp, synthetic construct
  misc_feature 1..20: note = Description of Artificial Sequence: Synthetic oligonucleotide
  misc_feature 1..20: note = Target: SCN10A; (+) strand; PAM type: YTN; PAM sequence: TTC
  source 1..20: mol_type = other DNA
tcttcttggtccttctgctc

SEQ ID NO: 74899 - DNA, 20 bp, synthetic construct
  misc_feature 1..20: note = Description of Artificial Sequence: Synthetic oligonucleotide
  misc_feature 1..20: note = Target: SCN10A; (+) strand; PAM type: YTN; PAM sequence: CTC
  source 1..20: mol_type = other DNA
ttcttggtccttctgctccc

SEQ ID NO: 74900 - DNA, 20 bp, synthetic construct
  misc_feature 1..20: note = Description of Artificial Sequence: Synthetic oligonucleotide
  misc_feature 1..20: note = Target: SCN10A; (+) strand; PAM type: YTN; PAM sequence: CTT
  source 1..20: mol_type = other DNA
cttggtccttctgctcccta

SEQ ID NO: 74901 - DNA, 20 bp, synthetic construct
  misc_feature 1..20: note = Description of Artificial Sequence: Synthetic oligonucleotide
  misc_feature 1..20: note = Target: SCN10A; (+) strand; PAM type: YTN; PAM sequence: TTC
  source 1..20: mol_type = other DNA
ttggtccttctgctccctat

SEQ ID NO: 74902 - DNA, 20 bp, synthetic construct
  misc_feature 1..20: note = Description of Artificial Sequence: Synthetic oligonucleotide
  misc_feature 1..20: note = Target: SCN10A; (+) strand; PAM type: YTN; PAM sequence: CTT
  source 1..20: mol_type = other DNA
ggtccttctgctccctatgc

SEQ ID NO: 74903 - DNA, 20 bp, synthetic construct
  misc_feature 1..20: note = Description of Artificial Sequence: Synthetic oligonucleotide
  misc_feature 1..20: note = Target: SCN10A; (+) strand; PAM type: YTN; PAM sequence: TTG
  source 1..20: mol_type = other DNA
gtccttctgctccctatgct

SEQ ID NO: 74904 - DNA, 20 bp, synthetic construct
  misc_feature 1..20: note = Description of Artificial Sequence: Synthetic oligonucleotide
  misc_feature 1..20: note = Target: SCN10A; (+) strand; PAM type: YTN; PAM sequence: CTT
  source 1..20: mol_type = other DNA
ctgctccctatgcttctctc

SEQ ID NO: 74905 - DNA, 20 bp, synthetic construct
  misc_feature 1..20: note = Description of Artificial Sequence: Synthetic oligonucleotide
  misc_feature 1..20: note = Target: SCN10A; (+) strand; PAM type: YTN; PAM sequence: TTC
  source 1..20: mol_type = other DNA
tgctccctatgcttctctct

SEQ ID NO: 74906 - DNA, 20 bp, synthetic construct
  misc_feature 1..20: note = Description of Artificial Sequence: Synthetic oligonucleotide
  misc_feature 1..20: note = Target: SCN10A; (+) strand; PAM type: YTN; PAM sequence: CTG
  source 1..20: mol_type = other DNA
ctccctatgcttctctctgg

SEQ ID NO: 74907 - DNA, 20 bp, synthetic construct
  misc_feature 1..20: note = Description of Artificial Sequence: Synthetic oligonucleotide
  misc_feature 1..20: note = Target: SCN10A; (+) strand; PAM type: YTN; PAM sequence: CTC
  source 1..20: mol_type = other DNA
cctatgcttctctctggctt

SEQ ID NO: 74908 - DNA, 20 bp, synthetic construct
  misc_feature 1..20: note = Description of Artificial Sequence: Synthetic oligonucleotide
  misc_feature 1..20: note = Target: SCN10A; (+) strand; PAM type: YTN; PAM sequence: CTA
  source 1..20: mol_type = other DNA
tgcttctctctggctttctt

SEQ ID NO: 74909 - DNA, 20 bp, synthetic construct
  misc_feature 1..20: note = Description of Artificial Sequence: Synthetic oligonucleotide
  misc_feature 1..20: note = Target: SCN10A; (+) strand; PAM type: YTN; PAM sequence: CTT
  source 1..20: mol_type = other DNA
ctctctggctttctttgttc

SEQ ID NO: 74910 - DNA, 20 bp, synthetic construct
  misc_feature 1..20: note = Description of Artificial Sequence: Synthetic oligonucleotide
  misc_feature 1..20: note = Target: SCN10A; (+) strand; PAM type: YTN; PAM sequence: TTC
  source 1..20: mol_type = other DNA
tctctggctttctttgttcc

SEQ ID NO: 74911 - DNA, 20 bp, synthetic construct
  misc_feature 1..20: note = Description of Artificial Sequence: Synthetic oligonucleotide
  misc_feature 1..20: note = Target: SCN10A; (+) strand; PAM type: YTN; PAM sequence: CTC
  source 1..20: mol_type = other DNA
tctggctttctttgttccct

SEQ ID NO: 74912 - DNA, 20 bp, synthetic construct
  misc_feature 1..20: note = Description of Artificial Sequence: Synthetic oligonucleotide
  misc_feature 1..20: note = Target: SCN10A; (+) strand; PAM type: YTN; PAM sequence: CTC
  source 1..20: mol_type = other DNA
tggctttctttgttccctgc

SEQ ID NO: 74913 - DNA, 20 bp, synthetic construct
  misc_feature 1..20: note = Description of Artificial Sequence: Synthetic oligonucleotide
  misc_feature 1..20: note = Target: SCN10A; (+) strand; PAM type: YTN; PAM sequence: CTG
  source 1..20: mol_type = other DNA
gctttctttgttccctgctt

SEQ ID NO: 74914 - DNA, 20 bp, synthetic construct
  misc_feature 1..20: note = Description of Artificial Sequence: Synthetic oligonucleotide
  misc_feature 1..20: note = Target: SCN10A; (+) strand; PAM type: YTN; PAM sequence: CTT
  source 1..20: mol_type = other DNA
tctttgttccctgcttggca

SEQ ID NO: 74915 - DNA, 20 bp, synthetic construct
  misc_feature 1..20: note = Description of Artificial Sequence: Synthetic oligonucleotide
  misc_feature 1..20: note = Target: SCN10A; (+) strand; PAM type: YTN; PAM sequence: TTT
  source 1..20: mol_type = other DNA
ctttgttccctgcttggcag

SEQ ID NO: 74916 - DNA, 20 bp, synthetic construct
  misc_feature 1..20: note = Description of Artificial Sequence: Synthetic oligonucleotide
  misc_feature 1..20: note = Target: SCN10A; (+) strand; PAM type: YTN; PAM sequence: TTC
  source 1..20: mol_type = other DNA
tttgttccctgcttggcagc

SEQ ID NO: 74917 - DNA, 20 bp, synthetic construct
  misc_feature 1..20: note = Description of Artificial Sequence: Synthetic oligonucleotide
  misc_feature 1..20: note = Target: SCN10A; (+) strand; PAM type: YTN; PAM sequence: CTT
  source 1..20: mol_type = other DNA
tgttccctgcttggcagcaa

SEQ ID NO: 74918 - DNA, 20 bp, synthetic construct
  misc_feature 1..20: note = Description of Artificial Sequence: Synthetic oligonucleotide
  misc_feature 1..20: note = Target: SCN10A; (+) strand; PAM type: YTN; PAM sequence: TTT
  source 1..20: mol_type = other DNA
gttccctgcttggcagcaat

SEQ ID NO: 74919 - DNA, 20 bp, synthetic construct
  misc_feature 1..20: note = Description of Artificial Sequence: Synthetic oligonucleotide
  misc_feature 1..20: note = Target: SCN10A; (+) strand; PAM type: YTN; PAM sequence: TTG
  source 1..20: mol_type = other DNA
ttccctgcttggcagcaatt

SEQ ID NO: 74920 - DNA, 20 bp, synthetic construct
  misc_feature 1..20: note = Description of Artificial Sequence: Synthetic oligonucleotide
  misc_feature 1..20: note = Target: SCN10A; (+) strand; PAM type: YTN; PAM sequence: TTC
  source 1..20: mol_type = other DNA
cctgcttggcagcaatttgc

SEQ ID NO: 74921 - DNA, 20 bp, synthetic construct
  misc_feature 1..20: note = Description of Artificial Sequence: Synthetic oligonucleotide
  misc_feature 1..20: note = Target: SCN10A; (+) strand; PAM type: YTN; PAM sequence: CTG
  source 1..20: mol_type = other DNA
cttggcagcaatttgcttct

SEQ ID NO: 74922 - DNA, 20 bp, synthetic construct
  misc_feature 1..20: note = Description of Artificial Sequence: Synthetic oligonucleotide
  misc_feature 1..20: note = Target: SCN10A; (+) strand; PAM type: YTN; PAM sequence: CTT
  source 1..20: mol_type = other DNA
ggcagcaatttgcttctcta

SEQ ID NO: 74923 - DNA, 20 bp, synthetic construct
  misc_feature 1..20: note = Description of Artificial Sequence: Synthetic oligonucleotide
  misc_feature 1..20: note = Target: SCN10A; (+) strand; PAM type: YTN; PAM sequence: TTG
  source 1..20: mol_type = other DNA
gcagcaatttgcttctctat

SEQ ID NO: 74924 - DNA, 20 bp, synthetic construct
  misc_feature 1..20: note = Description of Artificial Sequence: Synthetic oligonucleotide
  misc_feature 1..20: note = Target: SCN10A; (+) strand; PAM type: YTN; PAM sequence: TTT
  source 1..20: mol_type = other DNA
gcttctctatctccaccagt

SEQ ID NO: 74925 - DNA, 20 bp, synthetic construct
  misc_feature 1..20: note = Description of Artificial Sequence: Synthetic oligonucleotide
  misc_feature 1..20: note = Target: SCN10A; (+) strand; PAM type: YTN; PAM sequence: TTG
  source 1..20: mol_type = other DNA
cttctctatctccaccagtg

SEQ ID NO: 74926 - DNA, 20 bp, synthetic construct
  misc_feature 1..20: note = Description of Artificial Sequence: Synthetic oligonucleotide
  misc_feature 1..20: note = Target: SCN10A; (+) strand; PAM type: YTN; PAM sequence: CTT
  source 1..20: mol_type = other DNA
ctctatctccaccagtgact

SEQ ID NO: 74927 - DNA, 20 bp, synthetic construct
  misc_feature 1..20: note = Description of Artificial Sequence: Synthetic oligonucleotide
  misc_feature 1..20: note = Target: SCN10A; (+) strand; PAM type: YTN; PAM sequence: TTC
  source 1..20: mol_type = other DNA
tctatctccaccagtgactc

SEQ ID NO: 74928 - DNA, 20 bp, synthetic construct
  misc_feature 1..20: note = Description of Artificial Sequence: Synthetic oligonucleotide
  misc_feature 1..20: note = Target: SCN10A; (+) strand; PAM type: YTN; PAM sequence: CTC
  source 1..20: mol_type = other DNA
tatctccaccagtgactccg

SEQ ID NO: 74929 - DNA, 20 bp, synthetic construct
  misc_feature 1..20: note = Description of Artificial Sequence: Synthetic oligonucleotide
  misc_feature 1..20: note = Target: SCN10A; (+) strand; PAM type: YTN; PAM sequence: CTA
  source 1..20: mol_type = other DNA
tctccaccagtgactccgga

SEQ ID NO: 74930 - DNA, 20 bp, synthetic construct
  misc_feature 1..20: note = Description of Artificial Sequence: Synthetic oligonucleotide
  misc_feature 1..20: note = Target: SCN10A; (+) strand; PAM type: YTN; PAM sequence: CTC
  source 1..20: mol_type = other DNA
caccagtgactccggagtaa

SEQ ID NO: 74931 - DNA, 20 bp, synthetic construct
  misc_feature 1..20: note = Description of Artificial Sequence: Synthetic oligonucleotide
  misc_feature 1..20: note = Target: SCN10A; (+) strand; PAM type: YTN; PAM sequence: CTC
  source 1..20: mol_type = other DNA
cggagtaaagcgacggaagt

SEQ ID NO: 74932 - DNA, 20 bp, synthetic construct
  misc_feature 1..20: note = Description of Artificial Sequence: Synthetic oligonucleotide
  misc_feature 1..20: note = Target: SCN10A; (+) strand; PAM type: YTN; PAM sequence: TTG
  source 1..20: mol_type = other DNA
ttagtttcgagggatccaat

SEQ ID NO: 74933 - DNA, 20 bp, synthetic construct
  misc_feature 1..20: note = Description of Artificial Sequence: Synthetic oligonucleotide
  misc_feature 1..20: note = Target: SCN10A; (+) strand; PAM type: YTN; PAM sequence: TTA
  source 1..20: mol_type = other DNA
gtttcgagggatccaatggg

SEQ ID NO: 74934 - DNA, 20 bp, synthetic construct
  misc_feature 1..20: note = Description of Artificial Sequence: Synthetic oligonucleotide
  misc_feature 1..20: note = Target: SCN10A; (+) strand; PAM type: YTN; PAM sequence: TTT
  source 1..20: mol_type = other DNA
cgagggatccaatggggaat

SEQ ID NO: 74935 - DNA, 20 bp, synthetic construct
  misc_feature 1..20: note = Description of Artificial Sequence: Synthetic oligonucleotide
  misc_feature 1..20: note = Target: SCN10A; (+) strand; PAM type: YTN; PAM sequence: TTC
  source 1..20: mol_type = other DNA
gagggatccaatggggaatt

SEQ ID NO: 74936 - DNA, 20 bp, synthetic construct
  misc_feature 1..20: note = Description of Artificial Sequence: Synthetic oligonucleotide
  misc_feature 1..20: note = Target: SCN10A; (+) strand; PAM type: YTN; PAM sequence: TTC
  source 1..20: mol_type = other DNA
catcttctcattcttcttca

SEQ ID NO: 74937 - DNA, 20 bp, synthetic construct
  misc_feature 1..20: note = Description of Artificial Sequence: Synthetic oligonucleotide
  misc_feature 1..20: note = Target: SCN10A; (+) strand; PAM type: YTN; PAM sequence: CTT
  source 1..20: mol_type = other DNA
ctcattcttcttcaggaagt

SEQ ID NO: 74938 - DNA, 20 bp, synthetic construct
  misc_feature 1..20: note = Description of Artificial Sequence: Synthetic oligonucleotide
  misc_feature 1..20: note = Target: SCN10A; (+) strand; PAM type: YTN; PAM sequence: TTC
  source 1..20: mol_type = other DNA
tcattcttcttcaggaagta

SEQ ID NO: 74939 - DNA, 20 bp, synthetic construct
  misc_feature 1..20: note = Description of Artificial Sequence: Synthetic oligonucleotide
  misc_feature 1..20: note = Target: SCN10A; (+) strand; PAM type: YTN; PAM sequence: CTC
  source 1..20: mol_type = other DNA
attcttcttcaggaagtatt

SEQ ID NO: 74940 - DNA, 20 bp, synthetic construct
  misc_feature 1..20: note = Description of Artificial Sequence: Synthetic oligonucleotide
  misc_feature 1..20: note = Target: SCN10A; (+) strand; PAM type: YTN; PAM sequence: TTC
  source 1..20: mol_type = other DNA
ttcttcaggaagtatttata

SEQ ID NO: 74941 - DNA, 20 bp, synthetic construct
  misc_feature 1..20: note = Description of Artificial Sequence: Synthetic oligonucleotide
  misc_feature 1..20: note = Target: SCN10A; (+) strand; PAM type: YTN; PAM sequence: CTT
  source 1..20: mol_type = other DNA
cttcaggaagtatttatact

SEQ ID NO: 74942 - DNA, 20 bp, synthetic construct
  misc_feature 1..20: note = Description of Artificial Sequence: Synthetic oligonucleotide
  misc_feature 1..20: note = Target: SCN10A; (+) strand; PAM type: YTN; PAM sequence: TTC
  source 1..20: mol_type = other DNA
ttcaggaagtatttatactc

SEQ ID NO: 74943 - DNA, 20 bp, synthetic construct
  misc_feature 1..20: note = Description of Artificial Sequence: Synthetic oligonucleotide
  misc_feature 1..20: note = Target: SCN10A; (+) strand; PAM type: YTN; PAM sequence: CTT
  source 1..20: mol_type = other DNA
caggaagtatttatactctt

SEQ ID NO: 74944 - DNA, 20 bp, synthetic construct
  misc_feature 1..20: note = Description of Artificial Sequence: Synthetic oligonucleotide
  misc_feature 1..20: note = Target: SCN10A; (+) strand; PAM type: YTN; PAM sequence: TTC
  source 1..20: mol_type = other DNA
aggaagtatttatactctta

SEQ ID NO: 74945 - DNA, 20 bp, synthetic construct
  misc_feature 1..20: note = Description of Artificial Sequence: Synthetic oligonucleotide
  misc_feature 1..20: note = Target: SCN10A; (+) strand; PAM type: YTN; PAM sequence: TTT
  source 1..20: mol_type = other DNA
atactcttataagagtggac

SEQ ID NO: 74946 - DNA, 20 bp, synthetic construct
  misc_feature 1..20: note = Description of Artificial Sequence: Synthetic oligonucleotide
  misc_feature 1..20: note = Target: SCN10A; (+) strand; PAM type: YTN; PAM sequence: TTA
  source 1..20: mol_type = other DNA
tactcttataagagtggaca

SEQ ID NO: 74947 - DNA, 20 bp, synthetic construct
  misc_feature 1..20: note = Description of Artificial Sequence: Synthetic oligonucleotide
  misc_feature 1..20: note = Target: SCN10A; (+) strand; PAM type: YTN; PAM sequence: CTC
  source 1..20: mol_type = other DNA
ttataagagtggacataacc

SEQ ID NO: 74948 - DNA, 20 bp, synthetic construct
  misc_feature 1..20: note = Description of Artificial Sequence: Synthetic oligonucleotide
  misc_feature 1..20: note = Target: SCN10A; (+) strand; PAM type: YTN; PAM sequence: CTT
  source 1..20: mol_type = other DNA
ataagagtggacataaccac

SEQ ID NO: 74949 - DNA, 20 bp, synthetic construct
  misc_feature 1..20: note = Description of Artificial Sequence: Synthetic oligonucleotide
  misc_feature 1..20: note = Target: SCN10A; (+) strand; PAM type: YTN; PAM sequence: TTA
  source 1..20: mol_type = other DNA
taagagtggacataaccaca

SEQ ID NO: 74950 - DNA, 20 bp, synthetic construct
  misc_feature 1..20: note = Description of Artificial Sequence: Synthetic oligonucleotide
  misc_feature 1..20: note = Target: SCN10A; (+) strand; PAM type: YTN; PAM sequence: CTT
  source 1..20: mol_type = other DNA
gcccactggccctgtccctc

SEQ ID NO: 74951 - DNA, 20 bp, synthetic construct
  misc_feature 1..20: note = Description of Artificial Sequence: Synthetic oligonucleotide
  misc_feature 1..20: note = Target: SCN10A; (+) strand; PAM type: YTN; PAM sequence: TTG
  source 1..20: mol_type = other DNA
cccactggccctgtccctct

SEQ ID NO: 74952 - DNA, 20 bp, synthetic construct
  misc_feature 1..20: note = Description of Artificial Sequence: Synthetic oligonucleotide
  misc_feature 1..20: note = Target: SCN10A; (+) strand; PAM type: YTN; PAM sequence: CTG
  source 1..20: mol_type = other DNA
gccctgtccctctcatctgt

SEQ ID NO: 74953 - DNA, 20 bp, synthetic construct
  misc_feature 1..20: note = Description of Artificial Sequence: Synthetic oligonucleotide
  misc_feature 1..20: note = Target: SCN10A; (+) strand; PAM type: YTN; PAM sequence: CTG
  source 1..20: mol_type = other DNA
tccctctcatctgtcccatc

SEQ ID NO: 74954 - DNA, 20 bp, synthetic construct
  misc_feature 1..20: note = Description of Artificial Sequence: Synthetic oligonucleotide
  misc_feature 1..20: note = Target: SCN10A; (+) strand; PAM type: YTN; PAM sequence: CTC
  source 1..20: mol_type = other DNA
tcatctgtcccatcttgatt

SEQ ID NO: 74955 - DNA, 20 bp, synthetic construct
  misc_feature 1..20: note = Description of Artificial Sequence: Synthetic oligonucleotide
  misc_feature 1..20: note = Target: SCN10A; (+) strand; PAM type: YTN; PAM sequence: CTC
  source 1..20: mol_type = other DNA
atctgtcccatcttgattgt

SEQ ID NO: 74956 - DNA, 20 bp, synthetic construct
  misc_feature 1..20: note = Description of Artificial Sequence: Synthetic oligonucleotide
  misc_feature 1..20: note = Target: SCN10A; (+) strand; PAM type: YTN; PAM sequence: CTG
  source 1..20: mol_type = other DNA
tcccatcttgattgtcagaa

SEQ ID NO: 74957 - DNA, 20 bp, synthetic construct
  misc_feature 1..20: note = Description of Artificial Sequence: Synthetic oligonucleotide
  misc_feature 1..20: note = Target: SCN10A; (+) strand; PAM type: YTN; PAM sequence: CTT
  source 1..20: mol_type = other DNA
gattgtcagaacagcccttc

SEQ ID NO: 74958 - DNA, 20 bp, synthetic construct
  misc_feature 1..20: note = Description of Artificial Sequence: Synthetic oligonucleotide
  misc_feature 1..20: note = Target: SCN10A; (+) strand; PAM type: YTN; PAM sequence: TTG
  source 1..20: mol_type = other DNA
attgtcagaacagcccttct

SEQ ID NO: 74959 - DNA, 20 bp, synthetic construct
  misc_feature 1..20: note = Description of Artificial Sequence: Synthetic oligonucleotide
  misc_feature 1..20: note = Target: SCN10A; (+) strand; PAM type: YTN; PAM sequence: TTG
  source 1..20: mol_type = other DNA
tcagaacagcccttctccca

SEQ ID NO: 74960 - DNA, 20 bp, synthetic construct
  misc_feature 1..20: note = Description of Artificial Sequence: Synthetic oligonucleotide
  misc_feature 1..20: note = Target: SCN10A; (+) strand; PAM type: YTN; PAM sequence: CTT
  source 1..20: mol_type = other DNA
ctcccaccctcatatctggc

SEQ ID NO: 74961 - DNA, 20 bp, synthetic construct
  misc_feature 1..20: note = Description of Artificial Sequence: Synthetic oligonucleotide
  misc_feature 1..20: note = Target: SCN10A; (+) strand; PAM type: YTN; PAM sequence: TTC
  source 1..20: mol_type = other DNA
tcccaccctcatatctggcc

SEQ ID NO: 74962 - DNA, 20 bp, synthetic construct
  misc_feature 1..20: note = Description of Artificial Sequence: Synthetic oligonucleotide
  misc_feature 1..20: note = Target: SCN10A; (+) strand; PAM type: YTN; PAM sequence: CTC
  source 1..20: mol_type = other DNA
ccaccctcatatctggcccc

SEQ ID NO: 74963 - DNA, 20 bp, synthetic construct
  misc_feature 1..20: note = Description of Artificial Sequence: Synthetic oligonucleotide
  misc_feature 1..20: note = Target: SCN10A; (+) strand; PAM type: YTN; PAM sequence: CTC
  source 1..20: mol_type = other DNA
atatctggcccctccctgaa

SEQ ID NO: 74964 - DNA, 20 bp, synthetic construct
  misc_feature 1..20: note = Description of Artificial Sequence: Synthetic oligonucleotide
  misc_feature 1..20: note = Target: SCN10A; (+) strand; PAM type: YTN; PAM sequence: CTG
  source 1..20: mol_type = other DNA
gcccctccctgaactcacac

SEQ ID NO: 74965 - DNA, 20 bp, synthetic construct
  misc_feature 1..20: note = Description of Artificial Sequence: Synthetic oligonucleotide
  misc_feature 1..20: note = Target: SCN10A; (+) strand; PAM type: YTN; PAM sequence: CTC
  source 1..20: mol_type = other DNA
cctgaactcacacttggctc

SEQ ID NO: 74966 - DNA, 20 bp, synthetic construct
  misc_feature 1..20: note = Description of Artificial Sequence: Synthetic oligonucleotide
  misc_feature 1..20: note = Target: SCN10A; (+) strand; PAM type: YTN; PAM sequence: CTG
  source 1..20: mol_type = other DNA
aactcacacttggctcctcc

SEQ ID NO: 74967 - DNA, 20 bp, synthetic construct
  misc_feature 1..20: note = Description of Artificial Sequence: Synthetic oligonucleotide
  misc_feature 1..20: note = Target: SCN10A; (+) strand; PAM type: YTN; PAM sequence: CTC
  source 1..20: mol_type = other DNA
acacttggctcctcccagga

SEQ ID NO: 74968 - DNA, 20 bp, synthetic construct
  misc_feature 1..20: note = Description of Artificial Sequence: Synthetic oligonucleotide
  misc_feature 1..20: note = Target: SCN10A; (+) strand; PAM type: YTN; PAM sequence: CTT
  source 1..20: mol_type = other DNA
ggctcctcccaggaacccat

SEQ ID NO: 74969 - DNA, 20 bp, synthetic construct
  misc_feature 1..20: note = Description of Artificial Sequence: Synthetic oligonucleotide
  misc_feature 1..20: note = Target: SCN10A; (+) strand; PAM type: YTN; PAM sequence: TTG
  source 1..20: mol_type = other DNA
gctcctcccaggaacccatt

SEQ ID NO: 74970 - DNA, 20 bp, synthetic construct
  misc_feature 1..20: note = Description of Artificial Sequence: Synthetic oligonucleotide
  misc_feature 1..20: note = Target: SCN10A; (+) strand; PAM type: YTN; PAM sequence: CTC
  source 1..20: mol_type = other DNA
ctcccaggaacccattcccc

SEQ ID NO: 74971 - DNA, 20 bp, synthetic construct
  misc_feature 1..20: note = Description of Artificial Sequence: Synthetic oligonucleotide
  misc_feature 1..20: note = Target: SCN10A; (+) strand; PAM type: YTN; PAM sequence: CTC
  source 1..20: mol_type = other DNA
ccaggaacccattcccctgc

SEQ ID NO: 74972 - DNA, 20 bp, synthetic construct
  misc_feature 1..20: note = Description of Artificial Sequence: Synthetic oligonucleotide
  misc_feature 1..20: note = Target: SCN10A; (+) strand; PAM type: YTN; PAM sequence: TTC
  source 1..20: mol_type = other DNA
ccctgcaaggcattcagggg

SEQ ID NO: 74973 - DNA, 20 bp, synthetic construct
  misc_feature 1..20: note = Description of Artificial Sequence: Synthetic oligonucleotide
  misc_feature 1..20: note = Target: SCN10A; (+) strand; PAM type: YTN; PAM sequence: CTG
  source 1..20: mol_type = other DNA
caaggcattcaggggaggct

SEQ ID NO: 74974 - DNA, 20 bp, synthetic construct
  misc_feature 1..20: note = Description of Artificial Sequence: Synthetic oligonucleotide
  misc_feature 1..20: note = Target: SCN10A; (+) strand; PAM type: YTN; PAM sequence: TTC
  source 1..20: mol_type = other DNA
aggggaggctgtttattcaa

SEQ ID NO: 74975 - DNA, 20 bp, synthetic construct
  misc_feature 1..20: note = Description of Artificial Sequence: Synthetic oligonucleotide
  misc_feature 1..20: note = Target: SCN10A; (+) strand; PAM type: YTN; PAM sequence: CTG
  source 1..20: mol_type = other DNA
tttattcaaccctcctccag

SEQ ID NO: 74976 - DNA, 20 bp, synthetic construct
  misc_feature 1..20: note = Description of Artificial Sequence: Synthetic oligonucleotide
  misc_feature 1..20: note = Target: SCN10A; (+) strand; PAM type: YTN; PAM sequence: TTT
  source 1..20: mol_type = other DNA
attcaaccctcctccaggtg

SEQ ID NO: 74977 - DNA, 20 bp, synthetic construct
  misc_feature 1..20: note = Description of Artificial Sequence: Synthetic oligonucleotide
  misc_feature 1..20: note = Target: SCN10A; (+) strand; PAM type: YTN; PAM sequence: TTA
  source 1..20: mol_type = other DNA
ttcaaccctcctccaggtgc

SEQ ID NO: 74978 - DNA, 20 bp, synthetic construct
  misc_feature 1..20: note = Description of Artificial Sequence: Synthetic oligonucleotide
  misc_feature 1..20: note = Target: SCN10A; (+) strand; PAM type: YTN; PAM sequence: TTC
  source 1..20: mol_type = other DNA
aaccctcctccaggtgcctc

SEQ ID NO: 74979 - DNA, 20 bp, synthetic construct
  misc_feature 1..20: note = Description of Artificial Sequence: Synthetic oligonucleotide
  misc_feature 1..20: note = Target: SCN10A; (+) strand; PAM type: YTN; PAM sequence: CTC
  source 1..20: mol_type = other DNA
ctccaggtgcctcagggtta

SEQ ID NO: 74980 - DNA, 20 bp, synthetic construct
  misc_feature 1..20: note = Description of Artificial Sequence: Synthetic oligonucleotide
  misc_feature 1..20: note = Target: SCN10A; (+) strand; PAM type: YTN; PAM sequence: CTC
  source 1..20: mol_type = other DNA
caggtgcctcagggttatgt

SEQ ID NO: 74981 - DNA, 20 bp, synthetic construct
  misc_feature 1..20: note = Description of Artificial Sequence: Synthetic oligonucleotide
  misc_feature 1..20: note = Target: SCN10A; (+) strand; PAM type: YTN; PAM sequence: CTC
  source 1..20: mol_type = other DNA
agggttatgtctttgctccc

SEQ ID NO: 74982 - DNA, 20 bp, synthetic construct
  misc_feature 1..20: note = Description of Artificial Sequence: Synthetic oligonucleotide
  misc_feature 1..20: note = Target: SCN10A; (+) strand; PAM type: YTN; PAM sequence: TTA
  source 1..20: mol_type = other DNA
tgtctttgctccccatgtgc

SEQ ID NO: 74983 - DNA, 20 bp, synthetic construct
  misc_feature 1..20: note = Description of Artificial Sequence: Synthetic oligonucleotide
  misc_feature 1..20: note = Target: SCN10A; (+) strand; PAM type: YTN; PAM sequence: CTT
  source 1..20: mol_type = other DNA
tgctccccatgtgcttctat

SEQ ID NO: 74984 - DNA, 20 bp, synthetic construct
  misc_feature 1..20: note = Description of Artificial Sequence: Synthetic oligonucleotide
  misc_feature 1..20: note = Target: SCN10A; (+) strand; PAM type: YTN; PAM sequence: TTT
  source 1..20: mol_type = other DNA
gctccccatgtgcttctatg

SEQ ID NO: 74985 - DNA, 20 bp, synthetic construct
  misc_feature 1..20: note = Description of Artificial Sequence: Synthetic oligonucleotide
  misc_feature 1..20: note = Target: SCN10A; (+) strand; PAM type: YTN; PAM sequence: TTG
  source 1..20: mol_type = other DNA
ctccccatgtgcttctatgt

SEQ ID NO: 74986 - DNA, 20 bp, synthetic construct
  misc_feature 1..20: note = Description of Artificial Sequence: Synthetic oligonucleotide
  misc_feature 1..20: note = Target: SCN10A; (+) strand; PAM type: YTN; PAM sequence: CTC
  source 1..20: mol_type = other DNA
cccatgtgcttctatgtcat

SEQ ID NO: 74987 - DNA, 20 bp, synthetic construct
  misc_feature 1..20: note = Description of Artificial Sequence: Synthetic oligonucleotide
  misc_feature 1..20: note = Target: SCN10A; (+) strand; PAM type: YTN; PAM sequence: CTT
  source 1..20: mol_type = other DNA
ctatgtcattgcttcttcac

SEQ ID NO: 74988 - DNA, 20 bp, synthetic construct
  misc_feature 1..20: note = Description of Artificial Sequence: Synthetic oligonucleotide
  misc_feature 1..20: note = Target: SCN10A; (+) strand; PAM type: YTN; PAM sequence: TTC
  source 1..20: mol_type = other DNA
tatgtcattgcttcttcacc

SEQ ID NO: 74989 - DNA, 20 bp, synthetic construct
  misc_feature 1..20: note = Description of Artificial Sequence: Synthetic oligonucleotide
  misc_feature 1..20: note = Target: SCN10A; (+) strand; PAM type: YTN; PAM sequence: CTA
  source 1..20: mol_type = other DNA
tgtcattgcttcttcaccac

SEQ ID NO: 74990 - DNA, 20 bp, synthetic construct
  misc_feature 1..20: note = Description of Artificial Sequence: Synthetic oligonucleotide
  misc_feature 1..20: note = Target: SCN10A; (+) strand; PAM type: YTN; PAM sequence: TTG
  source 1..20: mol_type = other DNA
cttcttcaccactttgtacc

SEQ ID NO: 74991 - DNA, 20 bp, synthetic construct
  misc_feature 1..20: note = Description of Artificial Sequence: Synthetic oligonucleotide
  misc_feature 1..20: note = Target: SCN10A; (+) strand; PAM type: YTN; PAM sequence: CTT
  source 1..20: mol_type = other DNA
cttcaccactttgtaccatc

SEQ ID NO: 74992 - DNA, 20 bp, synthetic construct
  misc_feature 1..20: note = Description of Artificial Sequence: Synthetic oligonucleotide
  misc_feature 1..20: note = Target: SCN10A; (+) strand; PAM type: YTN; PAM sequence: TTC
  source 1..20: mol_type = other DNA
ttcaccactttgtaccatcc

SEQ ID NO: 74993 - DNA, 20 bp, synthetic construct
  misc_feature 1..20: note = Description of Artificial Sequence: Synthetic oligonucleotide
  misc_feature 1..20: note = Target: SCN10A; (+) strand; PAM type: YTN; PAM sequence: CTT
  source 1..20: mol_type = other DNA
caccactttgtaccatccta

SEQ ID NO: 74994 - DNA, 20 bp, synthetic construct
  misc_feature 1..20: note = Description of Artificial Sequence: Synthetic oligonucleotide
  misc_feature 1..20: note = Target: SCN10A; (+) strand; PAM type: YTN; PAM sequence: TTC
  source 1..20: mol_type = other DNA
accactttgtaccatcctac

SEQ ID NO: 74995 - DNA, 20 bp, synthetic construct
  misc_feature 1..20: note = Description of Artificial Sequence: Synthetic oligonucleotide
  misc_feature 1..20: note = Target: SCN10A; (+) strand; PAM type: YTN; PAM sequence: CTT
  source 1..20: mol_type = other DNA
tgtaccatcctaccaccacc

SEQ ID NO: 74996 - DNA, 20 bp, synthetic construct
  misc_feature 1..20: note = Description of Artificial Sequence: Synthetic oligonucleotide
  misc_feature 1..20: note = Target: SCN10A; (+) strand; PAM type: YTN; PAM sequence: TTT
  source 1..20: mol_type = other DNA
gtaccatcctaccaccacca

SEQ ID NO: 74997 - DNA, 20 bp, synthetic construct
  misc_feature 1..20: note = Description of Artificial Sequence: Synthetic oligonucleotide
  misc_feature 1..20: note = Target: SCN10A; (+) strand; PAM type: YTN; PAM sequence: TTG
  source 1..20: mol_type = other DNA
taccatcctaccaccaccac

SEQ ID NO: 74998 - DNA, 20 bp, synthetic construct
  misc_feature 1..20: note = Description of Artificial Sequence: Synthetic oligonucleotide
  misc_feature 1..20: note = Target: SCN10A; (+) strand; PAM type: YTN; PAM sequence: CTA
  source 1..20: mol_type = other DNA
ccaccaccaccagatttagc

SEQ ID NO: 74999 - DNA, 20 bp, synthetic construct
  misc_feature 1..20: note = Description of Artificial Sequence: Synthetic oligonucleotide
  misc_feature 1..20: note = Target: SCN10A; (+) strand; PAM type: YTN; PAM sequence: TTT
  source 1..20: mol_type = other DNA
agccatgctgccctctctcc

SEQ ID NO: 75000 - DNA, 20 bp, synthetic construct
  misc_feature 1..20: note = Description of Artificial Sequence: Synthetic oligonucleotide
  misc_feature 1..20: note = Target: SCN10A; (+) strand; PAM type: YTN; PAM sequence: TTA
  source 1..20: mol_type = other DNA
gccatgctgccctctctcct

SEQ ID NO: 75001 - DNA, 20 bp, synthetic construct
  misc_feature 1..20: note = Description of Artificial Sequence: Synthetic oligonucleotide
  misc_feature 1..20: note = Target: SCN10A; (+) strand; PAM type: YTN; PAM sequence: CTG
  source 1..20: mol_type = other DNA
ccctctctcctcatttccag

SEQ ID NO: 75002 - DNA, 20 bp, synthetic construct
  misc_feature 1..20: note = Description of Artificial Sequence: Synthetic oligonucleotide
  misc_feature 1..20: note = Target: SCN10A; (+) strand; PAM type: YTN; PAM sequence: CTC
  source 1..20: mol_type = other DNA
tctcctcatttccaggacca

SEQ ID NO: 75003 - DNA, 20 bp, synthetic construct
  misc_feature 1..20: note = Description of Artificial Sequence: Synthetic oligonucleotide
  misc_feature 1..20: note = Target: SCN10A; (+) strand; PAM type: YTN; PAM sequence: CTC
  source 1..20: mol_type = other DNA
tcctcatttccaggaccact

SEQ ID NO: 75004 - DNA, 20 bp, synthetic construct
  misc_feature 1..20: note = Description of Artificial Sequence: Synthetic oligonucleotide
  misc_feature 1..20: note = Target: SCN10A; (+) strand; PAM type: YTN; PAM sequence: CTC
  source 1..20: mol_type = other DNA
ctcatttccaggaccactga

SEQ ID NO: 75005 - DNA, 20 bp, synthetic construct
  misc_feature 1..20: note = Description of Artificial Sequence: Synthetic oligonucleotide
  misc_feature 1..20: note = Target: SCN10A; (+) strand; PAM type: YTN; PAM sequence: CTC
  source 1..20: mol_type = other DNA
atttccaggaccactgagtt

SEQ ID NO: 75006 - DNA, 20 bp, synthetic construct
  misc_feature 1..20: note = Description of Artificial Sequence: Synthetic oligonucleotide
  misc_feature 1..20: note = Target: SCN10A; (+) strand; PAM type: YTN; PAM sequence: TTT
  source 1..20: mol_type = other DNA
ccaggaccactgagttccag

SEQ ID NO: 75007 - DNA, 20 bp, synthetic construct
  misc_feature 1..20: note = Description of Artificial Sequence: Synthetic oligonucleotide
  misc_feature 1..20: note = Target: SCN10A; (+) strand; PAM type: YTN; PAM sequence: TTC
  source 1..20: mol_type = other DNA
caggaccactgagttccagg

SEQ ID NO: 75008 - DNA, 20 bp, synthetic construct
  misc_feature 1..20: note = Description of Artificial Sequence: Synthetic oligonucleotide
  misc_feature 1..20: note = Target: SCN10A; (+) strand; PAM type: YTN; PAM sequence: CTG
  source 1..20: mol_type = other DNA
agttccaggcactctcccat

SEQ ID NO: 75009 - DNA, 20 bp, synthetic construct
  misc_feature 1..20: note = Description of Artificial Sequence: Synthetic oligonucleotide
  misc_feature 1..20: note = Target: SCN10A; (+) strand; PAM type: YTN; PAM sequence: TTC
  source 1..20: mol_type = other DNA
caggcactctcccatattca

SEQ ID NO: 75010 - DNA, 20 bp, synthetic construct
  misc_feature 1..20: note = Description of Artificial Sequence: Synthetic oligonucleotide
  misc_feature 1..20: note = Target: SCN10A; (+) strand; PAM type: YTN; PAM sequence: CTC
  source 1..20: mol_type = other DNA
tcccatattcatcaaagact

SEQ ID NO: 75011 - DNA, 20 bp, synthetic construct
  misc_feature 1..20: note = Description of Artificial Sequence: Synthetic oligonucleotide
  misc_feature 1..20: note = Target: SCN10A; (+) strand; PAM type: YTN; PAM sequence: CTC
  source 1..20: mol_type = other DNA
ccatattcatcaaagacttt

SEQ ID NO: 75012 - DNA, 20 bp, synthetic construct
  misc_feature 1..20: note = Description of Artificial Sequence: Synthetic oligonucleotide
  misc_feature 1..20: note = Target: SCN10A; (+) strand; PAM type: YTN; PAM sequence: TTC
  source 1..20: mol_type = other DNA
atcaaagactttggtttata

SEQ ID NO: 75013 - DNA, 20 bp, synthetic construct
  misc_feature 1..20: note = Description of Artificial Sequence: Synthetic oligonucleotide
  misc_feature 1..20: note = Target: SCN10A; (+) strand; PAM type: YTN; PAM sequence: CTT
  source 1..20: mol_type = other DNA
tggtttatagtctactttat

SEQ ID NO: 75014 - DNA, 20 bp, synthetic construct
  misc_feature 1..20: note = Description of Artificial Sequence: Synthetic oligonucleotide
  misc_feature 1..20: note = Target: SCN10A; (+) strand; PAM type: YTN; PAM sequence: TTT
  source 1..20: mol_type = other DNA
ggtttatagtctactttatc

SEQ ID NO: 75015 - DNA, 20 bp, synthetic construct
  misc_feature 1..20: note = Description of Artificial Sequence: Synthetic oligonucleotide
  misc_feature 1..20: note = Target: SCN10A; (+) strand; PAM type: YTN; PAM sequence: TTG
  source 1..20: mol_type = other DNA
gtttatagtctactttatct

SEQ ID NO: 75016 - DNA, 20 bp, synthetic construct
  misc_feature 1..20: note = Description of Artificial Sequence: Synthetic oligonucleotide
  misc_feature 1..20: note = Target: SCN10A; (+) strand; PAM type: YTN; PAM sequence: TTT
  source 1..20: mol_type = other DNA
atagtctactttatcttaag

SEQ ID NO: 75017 - DNA, 20 bp, synthetic construct
  misc_feature 1..20: note = Description of Artificial Sequence: Synthetic oligonucleotide
  misc_feature 1..20: note = Target: SCN10A; (+) strand; PAM type: YTN; PAM sequence: TTA
  source 1..20: mol_type = other DNA
tagtctactttatcttaagt

SEQ ID NO: 75018 - DNA, 20 bp, synthetic construct
  misc_feature 1..20: note = Description of Artificial Sequence: Synthetic oligonucleotide
  misc_feature 1..20: note = Target: SCN10A; (+) strand; PAM type: YTN; PAM sequence: CTA
  source 1..20: mol_type = other DNA
ctttatcttaagtctcatgc

SEQ ID NO: 75019 - DNA, 20 bp, synthetic construct
  misc_feature 1..20: note = Description of Artificial Sequence: Synthetic oligonucleotide
  misc_feature 1..20: note = Target: SCN10A; (+) strand; PAM type: YTN; PAM sequence: CTT
  source 1..20: mol_type = other DNA
tatcttaagtctcatgctac

SEQ ID NO: 75020 - DNA, 20 bp, synthetic construct
  misc_feature 1..20: note = Description of Artificial Sequence: Synthetic oligonucleotide
  misc_feature 1..20: note = Target: SCN10A; (+) strand; PAM type: YTN; PAM sequence: TTT
  source 1..20: mol_type = other DNA
atcttaagtctcatgctact

SEQ ID NO: 75021 - DNA, 20 bp, synthetic construct
  misc_feature 1..20: note = Description of Artificial Sequence: Synthetic oligonucleotide
  misc_feature 1..20: note = Target: SCN10A; (+) strand; PAM type: YTN; PAM sequence: TTA
  source 1..20: mol_type = other DNA
tcttaagtctcatgctactt

SEQ ID NO: 75022 - DNA, 20 bp, synthetic construct
  misc_feature 1..20: note = Description of Artificial Sequence: Synthetic oligonucleotide
  misc_feature 1..20: note = Target: SCN10A; (+) strand; PAM type: YTN; PAM sequence: CTT
  source 1..20: mol_type = other DNA
aagtctcatgctactttctt

SEQ ID NO: 75023 - DNA, 20 bp, synthetic construct
  misc_feature 1..20: note = Description of Artificial Sequence: Synthetic oligonucleotide
  misc_feature 1..20: note = Target: SCN10A; (+) strand; PAM type: YTN; PAM sequence: TTA
  source 1..20: mol_type = other DNA
agtctcatgctactttctta

SEQ ID NO: 75024 - DNA, 20 bp, synthetic construct
  misc_feature 1..20: note = Description of Artificial Sequence: Synthetic oligonucleotide
  misc_feature 1..20: note = Target: SCN10A; (+) strand; PAM type: YTN; PAM sequence: CTC
  source 1..20: mol_type = other DNA
atgctactttcttatcacaa

SEQ ID NO: 75025 - DNA, 20 bp, synthetic construct
  misc_feature 1..20: note = Description of Artificial Sequence: Synthetic oligonucleotide
  misc_feature 1..20: note = Target: SCN10A; (+) strand; PAM type: YTN; PAM sequence: CTA
  source 1..20: mol_type = other DNA
ctttcttatcacaatctttt

SEQ ID NO: 75026 - DNA, 20 bp, synthetic construct
  misc_feature 1..20: note = Description of Artificial Sequence: Synthetic oligonucleotide
  misc_feature 1..20: note = Target: SCN10A; (+) strand; PAM type: YTN; PAM sequence: CTT
  source 1..20: mol_type = other DNA
tcttatcacaatcttttatt

SEQ ID NO: 75027 - DNA, 20 bp, synthetic construct
  misc_feature 1..20: note = Description of Artificial Sequence: Synthetic oligonucleotide
  misc_feature 1..20: note = Target: SCN10A; (+) strand; PAM type: YTN; PAM sequence: TTT
  source 1..20: mol_type = other DNA
cttatcacaatcttttattt

SEQ ID NO: 75028 - DNA, 20 bp, synthetic construct
  misc_feature 1..20: note = Description of Artificial Sequence: Synthetic oligonucleotide
  misc_feature 1..20: note = Target: SCN10A; (+) strand; PAM type: YTN; PAM sequence: TTC
  source 1..20: mol_type = other DNA
ttatcacaatcttttattta

SEQ ID NO: 75029 - DNA, 20 bp, synthetic construct
  misc_feature 1..20: note = Description of Artificial Sequence: Synthetic oligonucleotide
  misc_feature 1..20: note = Target: SCN10A; (+) strand; PAM type: YTN; PAM sequence: CTT
  source 1..20: mol_type = other DNA
atcacaatcttttatttatt

SEQ ID NO: 75030 - DNA, 20 bp, synthetic construct
  misc_feature 1..20: note = Description of Artificial Sequence: Synthetic oligonucleotide
  misc_feature 1..20: note = Target: SCN10A; (+) strand; PAM type: YTN; PAM sequence: TTA
  source 1..20: mol_type = other DNA
tcacaatcttttatttattg

SEQ ID NO: 75031 - DNA, 20 bp, synthetic construct
  misc_feature 1..20: note = Description of Artificial Sequence: Synthetic oligonucleotide
  misc_feature 1..20: note = Target: SCN10A; (+) strand; PAM type: YTN; PAM sequence: CTT
  source 1..20: mol_type = other DNA
ttatttattgacattgtcaa

SEQ ID NO: 75032 - DNA, 20 bp, synthetic construct
  misc_feature 1..20: note = Description of Artificial Sequence: Synthetic oligonucleotide
  misc_feature 1..20: note = Target: SCN10A; (+) strand; PAM type: YTN; PAM sequence: TTT
  source 1..20: mol_type = other DNA
tatttattgacattgtcaac

SEQ ID NO: 75033 - DNA, 20 bp, synthetic construct
  misc_feature 1..20: note = Description of Artificial Sequence: Synthetic oligonucleotide
  misc_feature 1..20: note = Target: SCN10A; (+) strand; PAM type: YTN; PAM sequence: TTT
  source 1..20: mol_type = other DNA
atttattgacattgtcaaca

SEQ ID NO: 75034 - DNA, 20 bp, synthetic construct
  misc_feature 1..20: note = Description of Artificial Sequence: Synthetic oligonucleotide
  misc_feature 1..20: note = Target: SCN10A; (+) strand; PAM type: YTN; PAM sequence: TTA
  source 1..20: mol_type = other DNA
tttattgacattgtcaacat

SEQ ID NO: 75035 - DNA, 20 bp, synthetic construct
  misc_feature 1..20: note = Description of Artificial Sequence: Synthetic oligonucleotide
  misc_feature 1..20: note = Target: SCN10A; (+) strand; PAM type: YTN; PAM sequence: TTT
  source 1..20: mol_type = other DNA
attgacattgtcaacatttc

SEQ ID NO: 75036 - DNA, 20 bp, synthetic construct
  misc_feature 1..20: note = Description of Artificial Sequence: Synthetic oligonucleotide
  misc_feature 1..20: note = Target: SCN10A; (+) strand; PAM type: YTN; PAM sequence: TTA
  source 1..20: mol_type = other DNA
ttgacattgtcaacatttct

SEQ ID NO: 75037 - DNA, 20 bp, synthetic construct
  misc_feature 1..20: note = Description of Artificial Sequence: Synthetic oligonucleotide
  misc_feature 1..20: note = Target: SCN10A; (+) strand; PAM type: YTN; PAM sequence: TTG
  source 1..20: mol_type = other DNA
acattgtcaacatttctcca

SEQ ID NO: 75038 - DNA, 20 bp, synthetic construct
  misc_feature 1..20: note = Description of Artificial Sequence: Synthetic oligonucleotide
  misc_feature 1..20: note = Target: SCN10A; (+) strand; PAM type: YTN; PAM sequence: TTG
  source 1..20: mol_type = other DNA
tcaacatttctccacctgtt

SEQ ID NO: 75039 - DNA, 20 bp, synthetic construct
  misc_feature 1..20: note = Description of Artificial Sequence: Synthetic oligonucleotide
  misc_feature 1..20: note = Target: SCN10A; (+) strand; PAM type: YTN; PAM sequence: TTT
  source 1..20: mol_type = other DNA
ctccacctgtttgaatttca

SEQ ID NO: 75040 - DNA, 20 bp, synthetic construct
  misc_feature 1..20: note = Description of Artificial Sequence: Synthetic oligonucleotide
  misc_feature 1..20: note = Target: SCN10A; (+) strand; PAM type: YTN; PAM sequence: TTC
  source 1..20: mol_type = other DNA
tccacctgtttgaatttcat

SEQ ID NO: 75041 - DNA, 20 bp, synthetic construct
  misc_feature 1..20: note = Description of Artificial Sequence: Synthetic oligonucleotide
  misc_feature 1..20: note = Target: SCN10A; (+) strand; PAM type: YTN; PAM sequence: CTC
  source 1..20: mol_type = other DNA
cacctgtttgaatttcattt

SEQ ID NO: 75042 - DNA, 20 bp, synthetic construct
  misc_feature 1..20: note = Description of Artificial Sequence: Synthetic oligonucleotide
  misc_feature 1..20: note = Target: SCN10A; (+) strand; PAM type: YTN; PAM sequence: CTG
  source 1..20: mol_type = other DNA
tttgaatttcatttggacct

SEQ ID NO: 75043 - DNA, 20 bp, synthetic construct
  misc_feature 1..20: note = Description of Artificial Sequence: Synthetic oligonucleotide
  misc_feature 1..20: note = Target: SCN10A; (+) strand; PAM type: YTN; PAM sequence: TTT
  source 1..20: mol_type = other DNA
gaatttcatttggacctcca

SEQ ID NO: 75044 - DNA, 20 bp, synthetic construct
  misc_feature 1..20: note = Description of Artificial Sequence: Synthetic oligonucleotide
  misc_feature 1..20: note = Target: SCN10A; (+) strand; PAM type: YTN; PAM sequence: TTG
  source 1..20: mol_type = other DNA
aatttcatttggacctccaa

SEQ ID NO: 75045 - DNA, 20 bp, synthetic construct
  misc_feature 1..20: note = Description of Artificial Sequence: Synthetic oligonucleotide
  misc_feature 1..20: note = Target: SCN10A; (+) strand; PAM type: YTN; PAM sequence: TTT
  source 1..20: mol_type = other DNA
catttggacctccaagttac

SEQ ID NO: 75046 - DNA, 20 bp, synthetic construct
  misc_feature 1..20: note = Description of Artificial Sequence: Synthetic oligonucleotide
  misc_feature 1..20: note = Target: SCN10A; (+) strand; PAM type: YTN; PAM sequence: TTC
  source 1..20: mol_type = other DNA
atttggacctccaagttact

SEQ ID NO: 75047 - DNA, 20 bp, synthetic construct
  misc_feature 1..20: note = Description of Artificial Sequence: Synthetic oligonucleotide
  misc_feature 1..20: note = Target: SCN10A; (+) strand; PAM type: YTN; PAM sequence: TTT
  source 1..20: mol_type = other DNA
ggacctccaagttactggag

SEQ ID NO: 75048 - DNA, 20 bp, synthetic construct
  misc_feature 1..20: note = Description of Artificial Sequence: Synthetic oligonucleotide
  misc_feature 1..20: note = Target: SCN10A; (+) strand; PAM type: YTN; PAM sequence: TTG
  source 1..20: mol_type = other DNA
gacctccaagttactggaga

SEQ ID NO: 75049 - DNA, 20 bp, synthetic construct
  misc_feature 1..20: note = Description of Artificial Sequence: Synthetic oligonucleotide
  misc_feature 1..20: note = Target: SCN10A; (+) strand; PAM type: YTN; PAM sequence: CTC
  source 1..20: mol_type = other DNA
caagttactggagaactcca

SEQ ID NO: 75050 - DNA, 20 bp, synthetic construct
  misc_feature 1..20: note = Description of Artificial Sequence: Synthetic oligonucleotide
  misc_feature 1..20: note = Target: SCN10A; (+) strand; PAM type: YTN; PAM sequence: TTA
  source 1..20: mol_type = other DNA
ctggagaactccagattatt

SEQ ID NO: 75051 - DNA, 20 bp, synthetic construct
  misc_feature 1..20: note = Description of Artificial Sequence: Synthetic oligonucleotide
  misc_feature 1..20: note = Target: SCN10A; (+) strand; PAM type: YTN; PAM sequence: CTG
  source 1..20: mol_type = other DNA
gagaactccagattattgga

SEQ ID NO: 75052 - DNA, 20 bp, synthetic construct
  misc_feature 1..20: note = Description of Artificial Sequence: Synthetic oligonucleotide
  misc_feature 1..20: note = Target: SCN10A; (+) strand; PAM type: YTN; PAM sequence: CTC
  source 1..20: mol_type = other DNA
cagattattggagaatttca

SEQ ID NO: 75053 - DNA, 20 bp, synthetic construct
  misc_feature 1..20: note = Description of Artificial Sequence: Synthetic oligonucleotide
  misc_feature 1..20: note = Target: SCN10A; (+) strand; PAM type: YTN; PAM sequence: TTA
  source 1..20: mol_type = other DNA
ttggagaatttcattgggac

SEQ ID NO: 75054 - DNA, 20 bp, synthetic construct
  misc_feature 1..20: note = Description of Artificial Sequence: Synthetic oligonucleotide
  misc_feature 1..20: note = Target: SCN10A; (+) strand; PAM type: YTN; PAM sequence: TTG
  source 1..20: mol_type = other DNA
gagaatttcattgggacctc

SEQ ID NO: 75055 - DNA, 20 bp, synthetic construct
  misc_feature 1..20: note = Description of Artificial Sequence: Synthetic oligonucleotide
  misc_feature 1..20: note = Target: SCN10A; (+) strand; PAM type: YTN; PAM sequence: TTT
  source 1..20: mol_type = other DNA
cattgggacctccaatttct

SEQ ID NO: 75056 - DNA, 20 bp, synthetic construct
  misc_feature 1..20: note = Description of Artificial Sequence: Synthetic oligonucleotide
  misc_feature 1..20: note = Target: SCN10A; (+) strand; PAM type: YTN; PAM sequence: TTC
  source 1..20: mol_type = other DNA
attgggacctccaatttctc

SEQ ID NO: 75057 - DNA, 20 bp, synthetic construct
  misc_feature 1..20: note = Description of Artificial Sequence: Synthetic oligonucleotide
  misc_feature 1..20: note = Target: SCN10A; (+) strand; PAM type: YTN; PAM sequence: TTG
  source 1..20: mol_type = other DNA
ggacctccaatttctctggg

SEQ ID NO: 75058 - DNA, 20 bp, synthetic construct
  misc_feature 1..20: note = Description of Artificial Sequence: Synthetic oligonucleotide
  misc_feature 1..20: note = Target: SCN10A; (+) strand; PAM type: YTN; PAM sequence: CTC
  source 1..20: mol_type = other DNA
caatttctctgggacctcca

SEQ ID NO: 75059 - DNA, 20 bp, synthetic construct
  misc_feature 1..20: note = Description of Artificial Sequence: Synthetic oligonucleotide
  misc_feature 1..20: note = Target: SCN10A; (+) strand; PAM type: YTN; PAM sequence: TTT
  source 1..20: mol_type = other DNA
ctctgggacctccaggttca

SEQ ID NO: 75060 - DNA, 20 bp, synthetic construct
  misc_feature 1..20: note = Description of Artificial Sequence: Synthetic oligonucleotide
  misc_feature 1..20: note = Target: SCN10A; (+) strand; PAM type: YTN; PAM sequence: TTC
  source 1..20: mol_type = other DNA
tctgggacctccaggttcag

SEQ ID NO: 75061 - DNA, 20 bp, synthetic construct
  misc_feature 1..20: note = Description of Artificial Sequence: Synthetic oligonucleotide
  misc_feature 1..20: note = Target: SCN10A; (+) strand; PAM type: YTN; PAM sequence: CTC
  source 1..20: mol_type = other DNA
tgggacctccaggttcagtc

SEQ ID NO: 75062 - DNA, 20 bp, synthetic construct
  misc_feature 1..20: note = Description of Artificial Sequence: Synthetic oligonucleotide
  misc_feature 1..20: note = Target: SCN10A; (+) strand; PAM type: YTN; PAM sequence: CTG
  source 1..20: mol_type = other DNA
ggacctccaggttcagtctg

SEQ ID NO: 75063 - DNA, 20 bp, synthetic construct
  misc_feature 1..20: note = Description of Artificial Sequence: Synthetic oligonucleotide
  misc_feature 1..20: note = Target: SCN10A; (+) strand; PAM type: YTN; PAM sequence: CTC
  source 1..20: mol_type = other DNA
caggttcagtctgtggctga

SEQ ID NO: 75064 - DNA, 20 bp, synthetic construct
  misc_feature 1..20: note = Description of Artificial Sequence: Synthetic oligonucleotide
  misc_feature 1..20: note = Target: SCN10A; (+) strand; PAM type: YTN; PAM sequence: TTC
  source 1..20: mol_type = other DNA
agtctgtggctgaacacttt

SEQ ID NO: 75065 - DNA, 20 bp, synthetic construct
  misc_feature 1..20: note = Description of Artificial Sequence: Synthetic oligonucleotide
  misc_feature 1..20: note = Target: SCN10A; (+) strand; PAM type: YTN; PAM sequence: CTG
  source 1..20: mol_type = other DNA
tggctgaacacttttcccca

SEQ ID NO: 75066 - DNA, 20 bp, synthetic construct
  misc_feature 1..20: note = Description of Artificial Sequence: Synthetic oligonucleotide
  misc_feature 1..20: note = Target: SCN10A; (+) strand; PAM type: YTN; PAM sequence: CTG
  source 1..20: mol_type = other DNA
aacacttttccccataacca

SEQ ID NO: 75067 - DNA, 20 bp, synthetic construct
  misc_feature 1..20: note = Description of Artificial Sequence: Synthetic oligonucleotide
  misc_feature 1..20: note = Target: SCN10A; (+) strand; PAM type: YTN; PAM sequence: CTT
  source 1..20: mol_type = other DNA
ttccccataaccagattaga

SEQ ID NO: 75068 - DNA, 20 bp, synthetic construct
  misc_feature 1..20: note = Description of Artificial Sequence: Synthetic oligonucleotide
  misc_feature 1..20: note = Target: SCN10A; (+) strand; PAM type: YTN; PAM sequence: TTT
  source 1..20: mol_type = other DNA
tccccataaccagattagac

SEQ ID NO: 75069 - DNA, 20 bp, synthetic construct
  misc_feature 1..20: note = Description of Artificial Sequence: Synthetic oligonucleotide
  misc_feature 1..20: note = Target: SCN10A; (+) strand; PAM type: YTN; PAM sequence: TTT
  source 1..20: mol_type = other DNA
ccccataaccagattagacc

SEQ ID NO: 75070 - DNA, 20 bp, synthetic construct
  misc_feature 1..20: note = Description of Artificial Sequence: Synthetic oligonucleotide
  misc_feature 1..20: note = Target: SCN10A; (+) strand; PAM type: YTN; PAM sequence: TTC
  source 1..20: mol_type = other DNA
cccataaccagattagacct

SEQ ID NO: 75071 - DNA, 20 bp, synthetic construct
  misc_feature 1..20: note = Description of Artificial Sequence: Synthetic oligonucleotide
  misc_feature 1..20: note = Target: SCN10A; (+) strand; PAM type: YTN; PAM sequence: TTA
  source 1..20: mol_type = other DNA
gacctgtggtccacaatttt

SEQ ID NO: 75072 - DNA, 20 bp, synthetic construct
  misc_feature 1..20: note = Description of Artificial Sequence: Synthetic oligonucleotide
  misc_feature 1..20: note = Target: SCN10A; (+) strand; PAM type: YTN; PAM sequence: CTG
  source 1..20: mol_type = other DNA
tggtccacaattttgccact

SEQ ID NO: 75073 - DNA, 20 bp, synthetic construct
  misc_feature 1..20: note = Description of Artificial Sequence: Synthetic oligonucleotide
  misc_feature 1..20: note = Target: SCN10A; (+) strand; PAM type: YTN; PAM sequence: TTT
  source 1..20: mol_type = other DNA
tgccactccctcacccttat

SEQ ID NO: 75074 - DNA, 20 bp, synthetic construct
  misc_feature 1..20: note = Description of Artificial Sequence: Synthetic oligonucleotide
  misc_feature 1..20: note = Target: SCN10A; (+) strand; PAM type: YTN; PAM sequence: TTT
  source 1..20: mol_type = other DNA
gccactccctcacccttatc

SEQ ID NO: 75075 - DNA, 20 bp, synthetic construct
  misc_feature 1..20: note = Description of Artificial Sequence: Synthetic oligonucleotide
  misc_feature 1..20: note = Target: SCN10A; (+) strand; PAM type: YTN; PAM sequence: TTG
  source 1..20: mol_type = other DNA
ccactccctcacccttatcc

SEQ ID NO: 75076 - DNA, 20 bp, synthetic construct
  misc_feature 1..20: note = Description of Artificial Sequence: Synthetic oligonucleotide
  misc_feature 1..20: note = Target: SCN10A; (+) strand; PAM type: YTN; PAM sequence: CTC
  source 1..20: mol_type = other DNA
cctcacccttatcctaaatc

SEQ ID NO: 75077 - DNA, 20 bp, synthetic construct
  misc_feature 1..20: note = Description of Artificial Sequence: Synthetic oligonucleotide
  misc_feature 1..20: note = Target: SCN10A; (+) strand; PAM type: YTN; PAM sequence: CTC
  source 1..20: mol_type = other DNA
acccttatcctaaatcccaa

SEQ ID NO: 75078 - DNA, 20 bp, synthetic construct
  misc_feature 1..20: note = Description of Artificial Sequence: Synthetic oligonucleotide
  misc_feature 1..20: note = Target: SCN10A; (+) strand; PAM type: YTN; PAM sequence: CTT
  source 1..20: mol_type = other DNA
atcctaaatcccaaggctaa

SEQ ID NO: 75079 - DNA, 20 bp, synthetic construct
  misc_feature 1..20: note = Description of Artificial Sequence: Synthetic oligonucleotide
  misc_feature 1..20: note = Target: SCN10A; (+) strand; PAM type: YTN; PAM sequence: TTA
  source 1..20: mol_type = other DNA
tcctaaatcccaaggctaag

SEQ ID NO: 75080 - DNA, 20 bp, synthetic construct
  misc_feature 1..20: note = Description of Artificial Sequence: Synthetic oligonucleotide
  misc_feature 1..20: note = Target: SCN10A; (+) strand; PAM type: YTN; PAM sequence: CTA
  source 1..20: mol_type = other DNA
aatcccaaggctaagtcaat

SEQ ID NO: 75081 - DNA, 20 bp, synthetic construct
  misc_feature 1..20: note = Description of Artificial Sequence: Synthetic oligonucleotide
  misc_feature 1..20: note = Target: SCN10A; (+) strand; PAM type: YTN; PAM sequence: CTA
  source 1..20: mol_type = other DNA
agtcaatctagaacagttcc

SEQ ID NO: 75082 - DNA, 20 bp, synthetic construct
  misc_feature 1..20: note = Description of Artificial Sequence: Synthetic oligonucleotide
  misc_feature 1..20: note = Target: SCN10A; (+) strand; PAM type: YTN; PAM sequence: CTA
  source 1..20: mol_type = other DNA
gaacagttcccctgaactgc

SEQ ID NO: 75083 - DNA, 20 bp, synthetic construct
  misc_feature 1..20: note = Description of Artificial Sequence: Synthetic oligonucleotide
  misc_feature 1..20: note = Target: SCN10A; (+) strand; PAM type: YTN; PAM sequence: TTC
  source 1..20: mol_type = other DNA
ccctgaactgctgaggggtt

SEQ ID NO: 75084 - DNA, 20 bp, synthetic construct
  misc_feature 1..20: note = Description of Artificial Sequence: Synthetic oligonucleotide
  misc_feature 1..20: note = Target: SCN10A; (+) strand; PAM type: YTN; PAM sequence: CTG
  source 1..20: mol_type = other DNA
aactgctgaggggttatggg

SEQ ID NO: 75085 - DNA, 20 bp, synthetic construct
  misc_feature 1..20: note = Description of Artificial Sequence: Synthetic oligonucleotide
  misc_feature 1..20: note = Target: SCN10A; (+) strand; PAM type: YTN; PAM sequence: CTG
  source 1..20: mol_type = other DNA
ctgaggggttatggggaacc

SEQ ID NO: 75086 - DNA, 20 bp, synthetic construct
  misc_feature 1..20: note = Description of Artificial Sequence: Synthetic oligonucleotide
  misc_feature 1..20: note = Target: SCN10A; (+) strand; PAM type: YTN; PAM sequence: CTG
  source 1..20: mol_type = other DNA
aggggttatggggaacctca

SEQ ID NO: 75087 - DNA, 20 bp, synthetic construct
  misc_feature 1..20: note = Description of Artificial Sequence: Synthetic oligonucleotide
  misc_feature 1..20: note = Target: SCN10A; (+) strand; PAM type: YTN; PAM sequence: TTA
  source 1..20: mol_type = other DNA
tggggaacctcagtattgcc

SEQ ID NO: 75088 - DNA, 20 bp, synthetic construct
  misc_feature 1..20: note = Description of Artificial Sequence: Synthetic oligonucleotide
  misc_feature 1..20: note = Target: SCN10A; (+) strand; PAM type: YTN; PAM sequence: CTC
  source 1..20: mol_type = other DNA
agtattgcctgggaatcata

SEQ ID NO: 75089 - DNA, 20 bp, synthetic construct
  misc_feature 1..20: note = Description of Artificial Sequence: Synthetic oligonucleotide
  misc_feature 1..20: note = Target: SCN10A; (+) strand; PAM type: YTN; PAM sequence: TTG
  source 1..20: mol_type = other DNA
cctgggaatcatatggtatc

SEQ ID NO: 75090 - DNA, 20 bp, synthetic construct
  misc_feature 1..20: note = Description of Artificial Sequence: Synthetic oligonucleotide
  misc_feature 1..20: note = Target: SCN10A; (+) strand; PAM type: YTN; PAM sequence: CTG
  source 1..20: mol_type = other DNA
ggaatcatatggtatcccta

SEQ ID NO: 75091 - DNA, 20 bp, synthetic construct
  misc_feature 1..20: note = Description of Artificial Sequence: Synthetic oligonucleotide
  misc_feature 1..20: note = Target: SCN10A; (+) strand; PAM type: YTN; PAM sequence: CTA
  source 1..20: mol_type = other DNA
gtcagcagtttcttctagtc

SEQ ID NO: 75092 - DNA, 20 bp, synthetic construct
  misc_feature 1..20: note = Description of Artificial Sequence: Synthetic oligonucleotide
  misc_feature 1..20: note = Target: SCN10A; (+) strand; PAM type: YTN; PAM sequence: TTT
  source 1..20: mol_type = other DNA
cttctagtctgaggtttcaa

SEQ ID NO: 75093 - DNA, 20 bp, synthetic construct
  misc_feature 1..20: note = Description of Artificial Sequence: Synthetic oligonucleotide
  misc_feature 1..20: note = Target: SCN10A; (+) strand; PAM type: YTN; PAM sequence: TTC
  source 1..20: mol_type = other DNA
ttctagtctgaggtttcaaa

SEQ ID NO: 75094 - DNA, 20 bp, synthetic construct
  misc_feature 1..20: note = Description of Artificial Sequence: Synthetic oligonucleotide
  misc_feature 1..20: note = Target: SCN10A; (+) strand; PAM type: YTN; PAM sequence: CTT
  source 1..20: mol_type = other DNA
ctagtctgaggtttcaaata

SEQ ID NO: 75095 - DNA, 20 bp, synthetic construct
  misc_feature 1..20: note = Description of Artificial Sequence: Synthetic oligonucleotide
  misc_feature 1..20: note = Target: SCN10A; (+) strand; PAM type: YTN; PAM sequence: TTC
  source 1..20: mol_type = other DNA
tagtctgaggtttcaaatac

SEQ ID NO: 75096 - DNA, 20 bp, synthetic construct
  misc_feature 1..20: note = Description of Artificial Sequence: Synthetic oligonucleotide
  misc_feature 1..20: note = Target: SCN10A; (+) strand; PAM type: YTN; PAM sequence: CTA
  source 1..20: mol_type = other DNA
gtctgaggtttcaaatacac

SEQ ID NO: 75097 - DNA, 20 bp, synthetic construct
  misc_feature 1..20: note = Description of Artificial Sequence: Synthetic oligonucleotide
  misc_feature 1..20: note = Target: SCN10A; (+) strand; PAM type: YTN; PAM sequence: CTG
  source 1..20: mol_type = other DNA
aggtttcaaatacactcttt

SEQ ID NO: 75098 - DNA, 20 bp, synthetic construct
  misc_feature 1..20: note = Description of Artificial Sequence: Synthetic oligonucleotide
  misc_feature 1..20: note = Target: SCN10A; (+) strand; PAM type: YTN; PAM sequence: TTT
  source 1..20: mol_type = other DNA
caaatacactcttttctcac

SEQ ID NO: 75099 - DNA, 20 bp, synthetic construct
  misc_feature 1..20: note = Description of Artificial Sequence: Synthetic oligonucleotide
  misc_feature 1..20: note = Target: SCN10A; (+) strand; PAM type: YTN; PAM sequence: TTC
  source 1..20: mol_type = other DNA
aaatacactcttttctcact

SEQ ID NO: 75100 - DNA, 20 bp, synthetic construct
  misc_feature 1..20: note = Description of Artificial Sequence: Synthetic oligonucleotide
  misc_feature 1..20: note = Target: SCN10A; (+) strand; PAM type: YTN; PAM sequence: CTC
  source 1..20: mol_type = other DNA
ttttctcactattccctgtc

SEQ ID NO: 75101 - DNA, 20 bp, synthetic construct
  misc_feature 1..20: note = Description of Artificial Sequence: Synthetic oligonucleotide
  misc_feature 1..20: note = Target: SCN10A; (+) strand; PAM type: YTN; PAM sequence: CTT
  source 1..20: mol_type = other DNA
ttctcactattccctgtctt

SEQ ID NO: 75102 - DNA, 20 bp, synthetic construct
  misc_feature 1..20: note = Description of Artificial Sequence: Synthetic oligonucleotide
  misc_feature 1..20: note = Target: SCN10A; (+) strand; PAM type: YTN; PAM sequence: TTT
  source 1..20: mol_type = other DNA
tctcactattccctgtcttc

SEQ ID NO: 75103 - DNA, 20 bp, synthetic construct
  misc_feature 1..20: note = Description of Artificial Sequence: Synthetic oligonucleotide
  misc_feature 1..20: note = Target: SCN10A; (+) strand; PAM type: YTN; PAM sequence: TTT
  source 1..20: mol_type = other DNA
ctcactattccctgtcttcc

SEQ ID NO: 75104 - DNA, 20 bp, synthetic construct
  misc_feature 1..20: note = Description of Artificial Sequence: Synthetic oligonucleotide
  misc_feature 1..20: note = Target: SCN10A; (+) strand; PAM type: YTN; PAM sequence: TTC
  source 1..20: mol_type = other DNA
tcactattccctgtcttccc

SEQ ID NO: 75105 - DNA, 20 bp, synthetic construct
  misc_feature 1..20: note = Description of Artificial Sequence: Synthetic oligonucleotide
  misc_feature 1..20: note = Target: SCN10A; (+) strand; PAM type: YTN; PAM sequence: CTC
  source 1..20: mol_type = other DNA
actattccctgtcttccctt

SEQ ID NO: 75106 - DNA, 20 bp, synthetic construct
  misc_feature 1..20: note = Description of Artificial Sequence: Synthetic oligonucleotide
  misc_feature 1..20: note = Target: SCN10A; (+) strand; PAM type: YTN; PAM sequence: CTA
  source 1..20: mol_type = other DNA
ttccctgtcttcccttgcag

SEQ ID NO: 75107 - DNA, 20 bp, synthetic construct
  misc_feature 1..20: note = Description of Artificial Sequence: Synthetic oligonucleotide
  misc_feature 1..20: note = Target: SCN10A; (+) strand; PAM type: YTN; PAM sequence: TTC
  source 1..20: mol_type = other DNA
cctgtcttcccttgcagtaa

SEQ ID NO: 75108 - DNA, 20 bp, synthetic construct
  misc_feature 1..20: note = Description of Artificial Sequence: Synthetic oligonucleotide
  misc_feature 1..20: note = Target: SCN10A; (+) strand; PAM type: YTN; PAM sequence: CTG
  source 1..20: mol_type = other DNA
tcttcccttgcagtaagcca

SEQ ID NO: 75109 - DNA, 20 bp, synthetic construct
  misc_feature 1..20: note = Description of Artificial Sequence: Synthetic oligonucleotide
  misc_feature 1..20: note = Target: SCN10A; (+) strand; PAM type: YTN; PAM sequence: CTT
  source 1..20: mol_type = other DNA
cccttgcagtaagccaatga

SEQ ID NO: 75110 - DNA, 20 bp, synthetic construct
  misc_feature 1..20: note = Description of Artificial Sequence: Synthetic oligonucleotide
  misc_feature 1..20: note = Target: SCN10A; (+) strand; PAM type: YTN; PAM sequence: TTC
  source 1..20: mol_type = other DNA
ccttgcagtaagccaatgac

SEQ ID NO: 75111 - DNA, 20 bp, synthetic construct
  misc_feature 1..20: note = Description of Artificial Sequence: Synthetic oligonucleotide
  misc_feature 1..20: note = Target: SCN10A; (+) strand; PAM type: YTN; PAM sequence: CTT
  source 1..20: mol_type = other DNA
gcagtaagccaatgaccata

SEQ ID NO: 75112 - DNA, 20 bp, synthetic construct
  misc_feature 1..20: note = Description of Artificial Sequence: Synthetic oligonucleotide
  misc_feature 1..20: note = Target: SCN10A; (+) strand; PAM type: YTN; PAM sequence: TTG
  source 1..20: mol_type = other DNA
cagtaagccaatgaccatat

SEQ ID NO: 75113 - DNA, 20 bp, synthetic construct
  misc_feature 1..20: note = Description of Artificial Sequence: Synthetic oligonucleotide
  misc_feature 1..20: note = Target: SCN10A; (+) strand; PAM type: YTN; PAM sequence: TTT
  source 1..20: mol_type = other DNA
cctagttcatggagaaaaac

SEQ ID NO: 75114 - DNA, 20 bp, synthetic construct
  misc_feature 1..20: note = Description of Artificial Sequence: Synthetic oligonucleotide
  misc_feature 1..20: note = Target: SCN10A; (+) strand; PAM type: YTN; PAM sequence: TTC
  source 1..20: mol_type = other DNA
ctagttcatggagaaaaaca

SEQ ID NO: 75115 - DNA, 20 bp, synthetic construct
  misc_feature 1..20: note = Description of Artificial Sequence: Synthetic oligonucleotide
  misc_feature 1..20: note = Target: SCN10A; (+) strand; PAM type: YTN; PAM sequence: CTA
  source 1..20: mol_type = other DNA
gttcatggagaaaaacagaa

SEQ ID NO: 75116 - DNA, 20 bp, synthetic construct
  misc_feature 1..20: note = Description of Artificial Sequence: Synthetic oligonucleotide
  misc_feature 1..20: note = Target: SCN10A; (+) strand; PAM type: YTN; PAM sequence: TTC
  source 1..20: mol_type = other DNA
atggagaaaaacagaactct

SEQ ID NO: 75117 - DNA, 20 bp, synthetic construct
  misc_feature 1..20: note = Description of Artificial Sequence: Synthetic oligonucleotide
  misc_feature 1..20: note = Target: SCN10A; (+) strand; PAM type: YTN; PAM sequence: CTC
  source 1..20: mol_type = other DNA
tgccaacttcataccatcaa

SEQ ID NO: 75118 - DNA, 20 bp, synthetic construct
  misc_feature 1..20: note = Description of Artificial Sequence: Synthetic oligonucleotide
  misc_feature 1..20: note = Target: SCN10A; (+) strand; PAM type: YTN; PAM sequence: CTG
  source 1..20: mol_type = other DNA
ccaacttcataccatcaaac

SEQ ID NO: 75119 - DNA, 20 bp, synthetic construct
  misc_feature 1..20: note = Description of Artificial Sequence: Synthetic oligonucleotide
  misc_feature 1..20: note = Target: SCN10A; (+) strand; PAM type: YTN; PAM sequence: CTT
  source 1..20: mol_type = other DNA
cataccatcaaacctccaac

SEQ ID NO: 75120 - DNA, 20 bp, synthetic construct
  misc_feature 1..20: note = Description of Artificial Sequence: Synthetic oligonucleotide
  misc_feature 1..20: note = Target: SCN10A; (+) strand; PAM type: YTN; PAM sequence: TTC
  source 1..20: mol_type = other DNA
ataccatcaaacctccaact

SEQ ID NO: 75121 - DNA, 20 bp, synthetic construct
  misc_feature 1..20: note = Description of Artificial Sequence: Synthetic oligonucleotide
  misc_feature 1..20: note = Target: SCN10A; (+) strand; PAM type: YTN; PAM sequence: CTC
  source 1..20: mol_type = other DNA
caactcacctgtgtctgcag

SEQ ID NO: 75122 - DNA, 20 bp, synthetic construct
  misc_feature 1..20: note = Description of Artificial Sequence: Synthetic oligonucleotide
  misc_feature 1..20: note = Target: SCN10A; (+) strand; PAM type: YTN; PAM sequence: CTC
  source 1..20: mol_type = other DNA
acctgtgtctgcagccttct

SEQ ID NO: 75123 - DNA, 20 bp, synthetic construct
  misc_feature 1..20: note = Description of Artificial Sequence: Synthetic oligonucleotide
  misc_feature 1..20: note = Target: SCN10A; (+) strand; PAM type: YTN; PAM sequence: CTG
  source 1..20: mol_type = other DNA
tgtctgcagccttctttcct

SEQ ID NO: 75124 - DNA, 20 bp, synthetic construct
  misc_feature 1..20: note = Description of Artificial Sequence: Synthetic oligonucleotide
  misc_feature 1..20: note = Target: SCN10A; (+) strand; PAM type: YTN; PAM sequence: CTG
  source 1..20: mol_type = other DNA
cagccttctttcctccttcc

SEQ ID NO: 75125 - DNA, 20 bp, synthetic construct
  misc_feature 1..20: note = Description of Artificial Sequence: Synthetic oligonucleotide
  misc_feature 1..20: note = Target: SCN10A; (+) strand; PAM type: YTN; PAM sequence: CTT
  source 1..20: mol_type = other DNA
ctttcctccttcccttctct

SEQ ID NO: 75126 - DNA, 20 bp, synthetic construct
  misc_feature 1..20: note = Description of Artificial Sequence: Synthetic oligonucleotide
  misc_feature 1..20: note = Target: SCN10A; (+) strand; PAM type: YTN; PAM sequence: TTC
  source 1..20: mol_type = other DNA
tttcctccttcccttctctt

SEQ ID NO: 75127 - DNA, 20 bp, synthetic construct
  misc_feature 1..20: note = Description of Artificial Sequence: Synthetic oligonucleotide
  misc_feature 1..20: note = Target: SCN10A; (+) strand; PAM type: YTN; PAM sequence: CTT
  source 1..20: mol_type = other DNA
tcctccttcccttctcttac

SEQ ID NO: 75128 - DNA, 20 bp, synthetic construct
  misc_feature 1..20: note = Description of Artificial Sequence: Synthetic oligonucleotide
  misc_feature 1..20: note = Target: SCN10A; (+) strand; PAM type: YTN; PAM sequence: TTT
  source 1..20: mol_type = other DNA
cctccttcccttctcttaca

SEQ ID NO: 75129 - DNA, 20 bp, synthetic construct
  misc_feature 1..20: note = Description of Artificial Sequence: Synthetic oligonucleotide
  misc_feature 1..20: note = Target: SCN10A; (+) strand; PAM type: YTN; PAM sequence: TTC
  source 1..20: mol_type = other DNA
ctccttcccttctcttacaa

SEQ ID NO: 75130 - DNA, 20 bp, synthetic construct
  misc_feature 1..20: note = Description of Artificial Sequence: Synthetic oligonucleotide
  misc_feature 1..20: note = Target: SCN10A; (+) strand; PAM type: YTN; PAM sequence: CTC
  source 1..20: mol_type = other DNA
cttcccttctcttacaacat

SEQ ID NO: 75131 - DNA, 20 bp, synthetic construct
  misc_feature 1..20: note = Description of Artificial Sequence: Synthetic oligonucleotide
  misc_feature 1..20: note = Target: SCN10A; (+) strand; PAM type: YTN; PAM sequence: CTT
  source 1..20: mol_type = other DNA
cccttctcttacaacatgag

SEQ ID NO: 75132 - DNA, 20 bp, synthetic construct
  misc_feature 1..20: note = Description of Artificial Sequence: Synthetic oligonucleotide
  misc_feature 1..20: note = Target: SCN10A; (+) strand; PAM type: YTN; PAM sequence: TTC
  source 1..20: mol_type = other DNA
ccttctcttacaacatgaga

SEQ ID NO: 75133 - DNA, 20 bp, synthetic construct
  misc_feature 1..20: note = Description of Artificial Sequence: Synthetic oligonucleotide
  misc_feature 1..20: note = Target: SCN10A; (+) strand; PAM type: YTN; PAM sequence: CTT
  source 1..20: mol_type = other DNA
ctcttacaacatgagaggta

SEQ ID NO: 75134 - DNA, 20 bp, synthetic construct
  misc_feature 1..20: note = Description of Artificial Sequence: Synthetic oligonucleotide
  misc_feature 1..20: note = Target: SCN10A; (+) strand; PAM type: YTN; PAM sequence: TTC
  source 1..20: mol_type = other DNA
tcttacaacatgagaggtat

SEQ ID NO: 75135 - DNA, 20 bp, synthetic construct
  misc_feature 1..20: note = Description of Artificial Sequence: Synthetic oligonucleotide
  misc_feature 1..20: note = Target: SCN10A; (+) strand; PAM type: YTN; PAM sequence: CTC
  source 1..20: mol_type = other DNA
ttacaacatgagaggtatct

SEQ ID NO: 75136 - DNA, 20 bp, synthetic construct
  misc_feature 1..20: note = Description of Artificial Sequence: Synthetic oligonucleotide
  misc_feature 1..20: note = Target: SCN10A; (+) strand; PAM type: YTN; PAM sequence: CTT
  source 1..20: mol_type = other DNA
acaacatgagaggtatcttc

SEQ ID NO: 75137 - DNA, 20 bp, synthetic construct
  misc_feature 1..20: note = Description of Artificial Sequence: Synthetic oligonucleotide
  misc_feature 1..20: note = Target: SCN10A; (+) strand; PAM type: YTN; PAM sequence: TTA
  source 1..20: mol_type = other DNA
caacatgagaggtatcttcc

SEQ ID NO: 75138 - DNA, 20 bp, synthetic construct
  misc_feature 1..20: note = Description of Artificial Sequence: Synthetic oligonucleotide
  misc_feature 1..20: note = Target: SCN10A; (+) strand; PAM type: YTN; PAM sequence: CTT
  source 1..20: mol_type = other DNA
cctacattctaaggaccatt

SEQ ID NO: 75139 - DNA, 20 bp, synthetic construct
  misc_feature 1..20: note = Description of Artificial Sequence: Synthetic oligonucleotide
  misc_feature 1..20: note = Target: SCN10A; (+) strand; PAM type: YTN; PAM sequence: TTC
  source 1..20: mol_type = other DNA
ctacattctaaggaccattc

SEQ ID NO: 75140 - DNA, 20 bp, synthetic construct
  misc_feature 1..20: note = Description of Artificial Sequence: Synthetic oligonucleotide
  misc_feature 1..20: note = Target: SCN10A; (+) strand; PAM type: YTN; PAM sequence: CTA
  source 1..20: mol_type = other DNA
cattctaaggaccattcctt

SEQ ID NO: 75141 - DNA, 20 bp, synthetic construct
  misc_feature 1..20: note = Description of Artificial Sequence: Synthetic oligonucleotide
  misc_feature 1..20: note = Target: SCN10A; (+) strand; PAM type: YTN; PAM sequence: TTC
  source 1..20: mol_type = other DNA
taaggaccattcctttccct

SEQ ID NO: 75142 - DNA, 20 bp, synthetic construct
  misc_feature 1..20: note = Description of Artificial Sequence: Synthetic oligonucleotide
  misc_feature 1..20: note = Target: SCN10A; (+) strand; PAM type: YTN; PAM sequence: CTA
  source 1..20: mol_type = other DNA
aggaccattcctttccctct

SEQ ID NO: 75143 - DNA, 20 bp, synthetic construct
  misc_feature 1..20: note = Description of Artificial Sequence: Synthetic oligonucleotide
  misc_feature 1..20: note = Target: SCN10A; (+) strand; PAM type: YTN; PAM sequence: TTC
  source 1..20: mol_type = other DNA
ctttccctctgcttaggatc

SEQ ID NO: 75144 - DNA, 20 bp, synthetic construct
  misc_feature 1..20: note = Description of Artificial Sequence: Synthetic oligonucleotide
  misc_feature 1..20: note = Target: SCN10A; (+) strand; PAM type: YTN; PAM sequence: CTT
  source 1..20: mol_type = other DNA
tccctctgcttaggatctta

SEQ ID NO: 75145 - DNA, 20 bp, synthetic construct
  misc_feature 1..20: note = Description of Artificial Sequence: Synthetic oligonucleotide
  misc_feature 1..20: note = Target: SCN10A; (+) strand; PAM type: YTN; PAM sequence: TTT
  source 1..20: mol_type = other DNA
ccctctgcttaggatcttat

SEQ ID NO: 75146 - DNA, 20 bp, synthetic construct
  misc_feature 1..20: note = Description of Artificial Sequence: Synthetic oligonucleotide
  misc_feature 1..20: note = Target: SCN10A; (+) strand; PAM type: YTN; PAM sequence: TTC
  source 1..20: mol_type = other DNA
cctctgcttaggatcttatc

SEQ ID NO: 75147 - DNA, 20 bp, synthetic construct
  misc_feature 1..20: note = Description of Artificial Sequence: Synthetic oligonucleotide
  misc_feature 1..20: note = Target: SCN10A; (+) strand; PAM type: YTN; PAM sequence: CTC
  source 1..20: mol_type = other DNA
tgcttaggatcttatctcat

SEQ ID NO: 75148 - DNA, 20 bp, synthetic construct
  misc_feature 1..20: note = Description of Artificial Sequence: Synthetic oligonucleotide
  misc_feature 1..20: note = Target: SCN10A; (+) strand; PAM type: YTN; PAM sequence: CTG
  source 1..20: mol_type = other DNA
cttaggatcttatctcatat

SEQ ID NO: 75149 - DNA, 20 bp, synthetic construct
  misc_feature 1..20: note = Description of Artificial Sequence: Synthetic oligonucleotide
  misc_feature 1..20: note = Target: SCN10A; (+) strand; PAM type: YTN; PAM sequence: CTT
  source 1..20: mol_type = other DNA
aggatcttatctcatatcta

SEQ ID NO: 75150 - DNA, 20 bp, synthetic construct
  misc_feature 1..20: note = Description of Artificial Sequence: Synthetic oligonucleotide
  misc_feature 1..20: note = Target: SCN10A; (+) strand; PAM type: YTN; PAM sequence: TTA
  source 1..20: mol_type = other DNA
ggatcttatctcatatctac

SEQ ID NO: 75151 - DNA, 20 bp, synthetic construct
  misc_feature 1..20: note = Description of Artificial Sequence: Synthetic oligonucleotide
  misc_feature 1..20: note = Target: SCN10A; (+) strand; PAM type: YTN; PAM sequence: CTT
  source 1..20: mol_type = other DNA
atctcatatctacctcattt

SEQ ID NO: 75152 - DNA, 20 bp, synthetic construct
  misc_feature 1..20: note = Description of Artificial Sequence: Synthetic oligonucleotide
  misc_feature 1..20: note = Target: SCN10A; (+) strand; PAM type: YTN; PAM sequence: TTA
  source 1..20: mol_type = other DNA
tctcatatctacctcatttt

SEQ ID NO: 75153 - DNA, 20 bp, synthetic construct
  misc_feature 1..20: note = Description of Artificial Sequence: Synthetic oligonucleotide
  misc_feature 1..20: note = Target: SCN10A; (+) strand; PAM type: YTN; PAM sequence: CTC
  source 1..20: mol_type = other DNA
atatctacctcatttttttc

SEQ ID NO: 75154 - DNA, 20 bp, synthetic construct
  misc_feature 1..20: note = Description of Artificial Sequence: Synthetic oligonucleotide
  misc_feature 1..20: note = Target: SCN10A; (+) strand; PAM type: YTN; PAM sequence: CTA
  source 1..20: mol_type = other DNA
cctcatttttttctctctcc

SEQ ID NO: 75155 - DNA, 20 bp, synthetic construct
  misc_feature 1..20: note = Description of Artificial Sequence: Synthetic oligonucleotide
  misc_feature 1..20: note = Target: SCN10A; (+) strand; PAM type: YTN; PAM sequence: CTC
  source 1..20: mol_type = other DNA
atttttttctctctccttgt

SEQ ID NO: 75156 - DNA, 20 bp, synthetic construct
  misc_feature 1..20: note = Description of Artificial Sequence: Synthetic oligonucleotide
  misc_feature 1..20: note = Target: SCN10A; (+) strand; PAM type: YTN; PAM sequence: TTT
  source 1..20: mol_type = other DNA
ttttctctctccttgtctgc

SEQ ID NO: 75157 - DNA, 20 bp, synthetic construct
  misc_feature 1..20: note = Description of Artificial Sequence: Synthetic oligonucleotide
  misc_feature 1..20: note = Target: SCN10A; (+) strand; PAM type: YTN; PAM sequence: TTT
  source 1..20: mol_type = other DNA
tttctctctccttgtctgcc

SEQ ID NO: 75158 - DNA, 20 bp, synthetic construct
  misc_feature 1..20: note = Description of Artificial Sequence: Synthetic oligonucleotide
  misc_feature 1..20: note = Target: SCN10A; (+) strand; PAM type: YTN; PAM sequence: TTT
  source 1..20: mol_type = other DNA
ttctctctccttgtctgcca

SEQ ID NO: 75159 - DNA, 20 bp, synthetic construct
  misc_feature 1..20: note = Description of Artificial Sequence: Synthetic oligonucleotide
  misc_feature 1..20: note = Target: SCN10A; (+) strand; PAM type: YTN; PAM sequence: TTT
  source 1..20: mol_type = other DNA
tctctctccttgtctgccag

SEQ ID NO: 75160 - DNA, 20 bp, synthetic construct
  misc_feature 1..20: note = Description of Artificial Sequence: Synthetic oligonucleotide
  misc_feature 1..20: note = Target: SCN10A; (+) strand; PAM type: YTN; PAM sequence: TTT
  source 1..20: mol_type = other DNA
ctctctccttgtctgccagc

SEQ ID NO: 75161 - DNA, 20 bp, synthetic construct
  misc_feature 1..20: note = Description of Artificial Sequence: Synthetic oligonucleotide
  misc_feature 1..20: note = Target: SCN10A; (+) strand; PAM type: YTN; PAM sequence: TTC
  source 1..20: mol_type = other DNA
tctctccttgtctgccagct

SEQ ID NO: 75162 - DNA, 20 bp, synthetic construct
  misc_feature 1..20: note = Description of Artificial Sequence: Synthetic oligonucleotide
  misc_feature 1..20: note = Target: SCN10A; (+) strand; PAM type: YTN; PAM sequence: CTC
  source 1..20: mol_type = other DNA
tctccttgtctgccagctct

SEQ ID NO: 75163 - DNA, 20 bp, synthetic construct
  misc_feature 1..20: note = Description of Artificial Sequence: Synthetic oligonucleotide
  misc_feature 1..20: note = Target: SCN10A; (+) strand; PAM type: YTN; PAM sequence: CTC
  source 1..20: mol_type = other DNA
tccttgtctgccagctcttt

SEQ ID NO: 75164 - DNA, 20 bp, synthetic construct
  misc_feature 1..20: note = Description of Artificial Sequence: Synthetic oligonucleotide
  misc_feature 1..20: note = Target: SCN10A; (+) strand; PAM type: YTN; PAM sequence: CTC
  source 1..20: mol_type = other DNA
cttgtctgccagctctttcc

SEQ ID NO: 75165 - DNA, 20 bp, synthetic construct
  misc_feature 1..20: note = Description of Artificial Sequence: Synthetic oligonucleotide
  misc_feature 1..20: note = Target: SCN10A; (+) strand; PAM type: YTN; PAM sequence: CTT
  source 1..20: mol_type = other DNA
gtctgccagctctttcctat

SEQ ID NO: 75166 - DNA, 20 bp, synthetic construct
  misc_feature 1..20: note = Description of Artificial Sequence: Synthetic oligonucleotide
  misc_feature 1..20: note = Target: SCN10A; (+) strand; PAM type: YTN; PAM sequence: TTG
  source 1..20: mol_type = other DNA
tctgccagctctttcctatc

SEQ ID NO: 75167 - DNA, 20 bp, synthetic construct
  misc_feature 1..20: note = Description of Artificial Sequence: Synthetic oligonucleotide
  misc_feature 1..20: note = Target: SCN10A; (+) strand; PAM type: YTN; PAM sequence: CTG
  source 1..20: mol_type = other DNA
ccagctctttcctatcagca

SEQ ID NO: 75168 - DNA, 20 bp, synthetic construct
  misc_feature 1..20: note = Description of Artificial Sequence: Synthetic oligonucleotide
  misc_feature 1..20: note = Target: SCN10A; (+) strand; PAM type: YTN; PAM sequence: CTC
  source 1..20: mol_type = other DNA
tttcctatcagcatttaaag

SEQ ID NO: 75169 - DNA, 20 bp, synthetic construct
  misc_feature 1..20: note = Description of Artificial Sequence: Synthetic oligonucleotide
  misc_feature 1..20: note = Target: SCN10A; (+) strand; PAM type: YTN; PAM sequence: CTT
  source 1..20: mol_type = other DNA
tcctatcagcatttaaagat

SEQ ID NO: 75170 - DNA, 20 bp, synthetic construct
  misc_feature 1..20: note = Description of Artificial Sequence: Synthetic oligonucleotide
  misc_feature 1..20: note = Target: SCN10A; (+) strand; PAM type: YTN; PAM sequence: TTT
  source 1..20: mol_type = other DNA
cctatcagcatttaaagatg

SEQ ID NO: 75171 - DNA, 20 bp, synthetic construct
  misc_feature 1..20: note = Description of Artificial Sequence: Synthetic oligonucleotide
  misc_feature 1..20: note = Target: SCN10A; (+) strand; PAM type: YTN; PAM sequence: TTC
  source 1..20: mol_type = other DNA
ctatcagcatttaaagatgc

SEQ ID NO: 75172 - DNA, 20 bp, synthetic construct
  misc_feature 1..20: note = Description of Artificial Sequence: Synthetic oligonucleotide
  misc_feature 1..20: note = Target: SCN10A; (+) strand; PAM type: YTN; PAM sequence: CTA
  source 1..20: mol_type = other DNA
tcagcatttaaagatgctta

SEQ ID NO: 75173 - DNA, 20 bp, synthetic construct
  misc_feature 1..20: note = Description of Artificial Sequence: Synthetic oligonucleotide
  misc_feature 1..20: note = Target: SCN10A; (+) strand; PAM type: YTN; PAM sequence: TTT
  source 1..20: mol_type = other DNA
aaagatgcttaactttcctc

SEQ ID NO: 75174 - DNA, 20 bp, synthetic construct
  misc_feature 1..20: note = Description of Artificial Sequence: Synthetic oligonucleotide
  misc_feature 1..20: note = Target: SCN10A; (+) strand; PAM type: YTN; PAM sequence: TTA
  source 1..20: mol_type = other DNA
aagatgcttaactttcctcc

SEQ ID NO: 75175 - DNA, 20 bp, synthetic construct
  misc_feature 1..20: note = Description of Artificial Sequence: Synthetic oligonucleotide
  misc_feature 1..20: note = Target: SCN10A; (+) strand; PAM type: YTN; PAM sequence: CTT
  source 1..20: mol_type = other DNA
aactttcctccaactttaaa

SEQ ID NO: 75176 - DNA, 20 bp, synthetic construct
  misc_feature 1..20: note = Description of Artificial Sequence: Synthetic oligonucleotide
  misc_feature 1..20: note = Target: SCN10A; (+) strand; PAM type: YTN; PAM sequence: TTA
  source 1..20: mol_type = other DNA
actttcctccaactttaaaa

SEQ ID NO: 75177 - DNA, 20 bp, synthetic construct
  misc_feature 1..20: note = Description of Artificial Sequence: Synthetic oligonucleotide
  misc_feature 1..20: note = Target: SCN10A; (+) strand; PAM type: YTN; PAM sequence: CTT
  source 1..20: mol_type = other DNA
tcctccaactttaaaaactt

SEQ ID NO: 75178 - DNA, 20 bp, synthetic construct
  misc_feature 1..20: note = Description of Artificial Sequence: Synthetic oligonucleotide
  misc_feature 1..20: note = Target: SCN10A; (+) strand; PAM type: YTN; PAM sequence: TTT
  source 1..20: mol_type = other DNA
cctccaactttaaaaacttt

SEQ ID NO: 75179 - DNA, 20 bp, synthetic construct
  misc_feature 1..20: note = Description of Artificial Sequence: Synthetic oligonucleotide
  misc_feature 1..20: note = Target: SCN10A; (+) strand; PAM type: YTN; PAM sequence: TTC
  source 1..20: mol_type = other DNA
ctccaactttaaaaactttc

SEQ ID NO: 75180 - DNA, 20 bp, synthetic construct
  misc_feature 1..20: note = Description of Artificial Sequence: Synthetic oligonucleotide
  misc_feature 1..20: note = Target: SCN10A; (+) strand; PAM type: YTN; PAM sequence: CTC
  source 1..20: mol_type = other DNA
caactttaaaaactttccct

SEQ ID NO: 75181 - DNA, 20 bp, synthetic construct
  misc_feature 1..20: note = Description of Artificial Sequence: Synthetic oligonucleotide
  misc_feature 1..20: note = Target: SCN10A; (+) strand; PAM type: YTN; PAM sequence: CTT
  source 1..20: mol_type = other DNA
taaaaactttcccttgatgc

SEQ ID NO: 75182 - DNA, 20 bp, synthetic construct
  misc_feature 1..20: note = Description of Artificial Sequence: Synthetic oligonucleotide
  misc_feature 1..20: note = Target: SCN10A; (+) strand; PAM type: YTN; PAM sequence: TTT
  source 1..20: mol_type = other DNA
aaaaactttcccttgatgca

SEQ ID NO: 75183 - DNA, 20 bp, synthetic construct
  misc_feature 1..20: note = Description of Artificial Sequence: Synthetic oligonucleotide
  misc_feature 1..20: note = Target: SCN10A; (+) strand; PAM type: YTN; PAM sequence: TTA
  source 1..20: mol_type = other DNA
aaaactttcccttgatgcag

SEQ ID NO: 75184 - DNA, 20 bp, synthetic construct
  misc_feature 1..20: note = Description of Artificial Sequence: Synthetic oligonucleotide
  misc_feature 1..20: note = Target: SCN10A; (+) strand; PAM type: YTN; PAM sequence: CTT
  source 1..20: mol_type = other DNA
tcccttgatgcagagcccat

SEQ ID NO: 75185 - DNA, 20 bp, synthetic construct
  misc_feature 1..20: note = Description of Artificial Sequence: Synthetic oligonucleotide
  misc_feature 1..20: note = Target: SCN10A; (+) strand; PAM type: YTN; PAM sequence: TTT
  source 1..20: mol_type = other DNA
cccttgatgcagagcccatc

SEQ ID NO: 75186 - DNA, 20 bp, synthetic construct
  misc_feature 1..20: note = Description of Artificial Sequence: Synthetic oligonucleotide
  misc_feature 1..20: note = Target: SCN10A; (+) strand; PAM type: YTN; PAM sequence: TTC
  source 1..20: mol_type = other DNA
ccttgatgcagagcccatcc

SEQ ID NO: 75187 - DNA, 20 bp, synthetic construct
  misc_feature 1..20: note = Description of Artificial Sequence: Synthetic oligonucleotide
  misc_feature 1..20: note = Target: SCN10A; (+) strand; PAM type: YTN; PAM sequence: CTT
  source 1..20: mol_type = other DNA
gatgcagagcccatccaggt

SEQ ID NO: 75188 - DNA, 20 bp, synthetic construct
  misc_feature 1..20: note = Description of Artificial Sequence: Synthetic oligonucleotide
  misc_feature 1..20: note = Target: SCN10A; (+) strand; PAM type: YTN; PAM sequence: TTG
  source 1..20: mol_type = other DNA
atgcagagcccatccaggtc

SEQ ID NO: 75189 - DNA, 20 bp, synthetic construct
  misc_feature 1..20: note = Description of Artificial Sequence: Synthetic oligonucleotide
  misc_feature 1..20: note = Target: SCN10A; (+) strand; PAM type: YTN; PAM sequence: CTT
  source 1..20: mol_type = other DNA
ccctcctctctcctgttctc

SEQ ID NO: 75190 - DNA, 20 bp, synthetic construct
  misc_feature 1..20: note = Description of Artificial Sequence: Synthetic oligonucleotide
  misc_feature 1..20: note = Target: SCN10A; (+) strand; PAM type: YTN; PAM sequence: TTC
  source 1..20: mol_type = other DNA
cctcctctctcctgttctct

SEQ ID NO: 75191 - DNA, 20 bp, synthetic construct
  misc_feature 1..20: note = Description of Artificial Sequence: Synthetic oligonucleotide
  misc_feature 1..20: note = Target: SCN10A; (+) strand; PAM type: YTN; PAM sequence: CTC
  source 1..20: mol_type = other DNA
ctctctcctgttctctattg

SEQ ID NO: 75192 - DNA, 20 bp, synthetic construct
  misc_feature 1..20: note = Description of Artificial Sequence: Synthetic oligonucleotide
  misc_feature 1..20: note = Target: SCN10A; (+) strand; PAM type: YTN; PAM sequence: CTC
  source 1..20: mol_type = other DNA
tctcctgttctctattggct

SEQ ID NO: 75193 - DNA, 20 bp, synthetic construct
  misc_feature 1..20: note = Description of Artificial Sequence: Synthetic oligonucleotide
  misc_feature 1..20: note = Target: SCN10A; (+) strand; PAM type: YTN; PAM sequence: CTC
  source 1..20: mol_type = other DNA
tcctgttctctattggcttt

SEQ ID NO: 75194 - DNA, 20 bp, synthetic construct
  misc_feature 1..20: note = Description of Artificial Sequence: Synthetic oligonucleotide
  misc_feature 1..20: note = Target: SCN10A; (+) strand; PAM type: YTN; PAM sequence: CTC
  source 1..20: mol_type = other DNA
ctgttctctattggctttta

SEQ ID NO: 75195 - DNA, 20 bp, synthetic construct
  misc_feature 1..20: note = Description of Artificial Sequence: Synthetic oligonucleotide
  misc_feature 1..20: note = Target: SCN10A; (+) strand; PAM type: YTN; PAM sequence: CTG
  source 1..20: mol_type = other DNA
ttctctattggcttttaata

SEQ ID NO: 75196 - DNA, 20 bp, synthetic construct
  misc_feature 1..20: note = Description of Artificial Sequence: Synthetic oligonucleotide
  misc_feature 1..20: note = Target: SCN10A; (+) strand; PAM type: YTN; PAM sequence: TTC
  source 1..20: mol_type = other DNA
tctattggcttttaataaag

SEQ ID NO: 75197 - DNA, 20 bp, synthetic construct
  misc_feature 1..20: note = Description of Artificial Sequence: Synthetic oligonucleotide
  misc_feature 1..20: note = Target: SCN10A; (+) strand; PAM type: YTN; PAM sequence: CTC
  source 1..20: mol_type = other DNA
tattggcttttaataaagga

SEQ ID NO: 75198 - DNA, 20 bp, synthetic construct
  misc_feature 1..20: note = Description of Artificial Sequence: Synthetic oligonucleotide
  misc_feature 1..20: note = Target: SCN10A; (+) strand; PAM type: YTN; PAM sequence: CTA
  source 1..20: mol_type = other DNA
ttggcttttaataaaggact

SEQ ID NO: 75199 - DNA, 20 bp, synthetic construct
  misc_feature 1..20: note = Description of Artificial Sequence: Synthetic oligonucleotide
  misc_feature 1..20: note = Target: SCN10A; (+) strand; PAM type: YTN; PAM sequence: TTG
  source 1..20: mol_type = other DNA
gcttttaataaaggacttac

SEQ ID NO: 75200 - DNA, 20 bp, synthetic construct
  misc_feature 1..20: note = Description of Artificial Sequence: Synthetic oligonucleotide
  misc_feature 1..20: note = Target: SCN10A; (+) strand; PAM type: YTN; PAM sequence: CTT
  source 1..20: mol_type = other DNA
ttaataaaggacttacttct

SEQ ID NO: 75201 - DNA, 20 bp, synthetic construct
  misc_feature 1..20: note = Description of Artificial Sequence: Synthetic oligonucleotide
  misc_feature 1..20: note = Target: SCN10A; (+) strand; PAM type: YTN; PAM sequence: TTT
  source 1..20: mol_type = other DNA
taataaaggacttacttcta

SEQ ID NO: 75202 - DNA, 20 bp, synthetic construct
  misc_feature 1..20: note = Description of Artificial Sequence: Synthetic oligonucleotide
  misc_feature 1..20: note = Target: SCN10A; (+) strand; PAM type: YTN; PAM sequence: TTT
  source 1..20: mol_type = other DNA
aataaaggacttacttctac

SEQ ID NO: 75203 - DNA, 20 bp, synthetic construct
  misc_feature 1..20: note = Description of Artificial Sequence: Synthetic oligonucleotide
  misc_feature 1..20: note = Target: SCN10A; (+) strand; PAM type: YTN; PAM sequence: TTA
  source 1..20: mol_type = other DNA
ataaaggacttacttctact

SEQ ID NO: 75204 - DNA, 20 bp, synthetic construct
  misc_feature 1..20: note = Description of Artificial Sequence: Synthetic oligonucleotide
  misc_feature 1..20: note = Target: SCN10A; (+) strand; PAM type: YTN; PAM sequence: CTT
  source 1..20: mol_type = other DNA
acttctactcactgtttcca

SEQ ID NO: 75205 - DNA, 20 bp, synthetic construct
  misc_feature 1..20: note = Description of Artificial Sequence: Synthetic oligonucleotide
  misc_feature 1..20: note = Target: SCN10A; (+) strand; PAM type: YTN; PAM sequence: TTA
  source 1..20: mol_type = other DNA
cttctactcactgtttccag

SEQ ID NO: 75206 - DNA, 20 bp, synthetic construct
  misc_feature 1..20: note = Description of Artificial Sequence: Synthetic oligonucleotide
  misc_feature 1..20: note = Target: SCN10A; (+) strand; PAM type: YTN; PAM sequence: CTT
  source 1..20: mol_type = other DNA
ctactcactgtttccagtca

SEQ ID NO: 75207 - DNA, 20 bp, synthetic construct
  misc_feature 1..20: note = Description of Artificial Sequence: Synthetic oligonucleotide
  misc_feature 1..20: note = Target: SCN10A; (+) strand; PAM type: YTN; PAM sequence: TTC
  source 1..20: mol_type = other DNA
tactcactgtttccagtcac

SEQ ID NO: 75208 - DNA, 20 bp, synthetic construct
  misc_feature 1..20: note = Description of Artificial Sequence: Synthetic oligonucleotide
  misc_feature 1..20: note = Target: SCN10A; (+) strand; PAM type: YTN; PAM sequence: CTA
  source 1..20: mol_type = other DNA
ctcactgtttccagtcactt

SEQ ID NO: 75209 - DNA, 20 bp, synthetic construct
  misc_feature 1..20: note = Description of Artificial Sequence: Synthetic oligonucleotide
  misc_feature 1..20: note = Target: SCN10A; (+) strand; PAM type: YTN; PAM sequence: CTC
  source 1..20: mol_type = other DNA
actgtttccagtcacttttc

SEQ ID NO: 75210 - DNA, 20 bp, synthetic construct
  misc_feature 1..20: note = Description of Artificial Sequence: Synthetic oligonucleotide
  misc_feature 1..20: note = Target: SCN10A; (+) strand; PAM type: YTN; PAM sequence: CTG
  source 1..20: mol_type = other DNA
tttccagtcacttttcagtc

SEQ ID NO: 75211 - DNA, 20 bp, synthetic construct
  misc_feature 1..20: note = Description of Artificial Sequence: Synthetic oligonucleotide
  misc_feature 1..20: note = Target: SCN10A; (+) strand; PAM type: YTN; PAM sequence: TTT
  source 1..20: mol_type = other DNA
ccagtcacttttcagtcttt

SEQ ID NO: 75212 - DNA, 20 bp, synthetic construct
  misc_feature 1..20: note = Description of Artificial Sequence: Synthetic oligonucleotide
  misc_feature 1..20: note = Target: SCN10A; (+) strand; PAM type: YTN; PAM sequence: TTC
  source 1..20: mol_type = other DNA
cagtcacttttcagtctttg

SEQ ID NO: 75213 - DNA, 20 bp, synthetic construct
  misc_feature 1..20: note = Description of Artificial Sequence: Synthetic oligonucleotide
  misc_feature 1..20: note = Target: SCN10A; (+) strand; PAM type: YTN; PAM sequence: CTT
  source 1..20: mol_type = other DNA
ttcagtctttgaagcttgga

SEQ ID NO: 75214 - DNA, 20 bp, synthetic construct
  misc_feature 1..20: note = Description of Artificial Sequence: Synthetic oligonucleotide
  misc_feature 1..20: note = Target: SCN10A; (+) strand; PAM type: YTN; PAM sequence: TTT
  source 1..20: mol_type = other DNA
tcagtctttgaagcttggat

SEQ ID NO: 75215 - DNA, 20 bp, synthetic construct
  misc_feature 1..20: note = Description of Artificial Sequence: Synthetic oligonucleotide
  misc_feature 1..20: note = Target: SCN10A; (+) strand; PAM type: YTN; PAM sequence: TTT
  source 1..20: mol_type = other DNA
cagtctttgaagcttggatt

SEQ ID NO: 75216 - DNA, 20 bp, synthetic construct
  misc_feature 1..20: note = Description of Artificial Sequence: Synthetic oligonucleotide
  misc_feature 1..20: note = Target: SCN10A; (+) strand; PAM type: YTN; PAM sequence: TTC
  source 1..20: mol_type = other DNA
agtctttgaagcttggattt

SEQ ID NO: 75217 - DNA, 20 bp, synthetic construct
  misc_feature 1..20: note = Description of Artificial Sequence: Synthetic oligonucleotide
  misc_feature 1..20: note = Target: SCN10A; (+) strand; PAM type: YTN; PAM sequence: CTT
  source 1..20: mol_type = other DNA
tgaagcttggattttgccct

SEQ ID NO: 75218 - DNA, 20 bp, synthetic construct
  misc_feature 1..20: note = Description of Artificial Sequence: Synthetic oligonucleotide
  misc_feature 1..20: note = Target: SCN10A; (+) strand; PAM type: YTN; PAM sequence: TTT
  source 1..20: mol_type = other DNA
gaagcttggattttgccctc

SEQ ID NO: 75219 - DNA, 20 bp, synthetic construct
  misc_feature 1..20: note = Description of Artificial Sequence: Synthetic oligonucleotide
  misc_feature 1..20: note = Target: SCN10A; (+) strand; PAM type: YTN; PAM sequence: TTG
  source 1..20: mol_type = other DNA
aagcttggattttgccctcc

SEQ ID NO: 75220 - DNA, 20 bp, synthetic construct
  misc_feature 1..20: note = Description of Artificial Sequence: Synthetic oligonucleotide
  misc_feature 1..20: note = Target: SCN10A; (+) strand; PAM type: YTN; PAM sequence: CTT
  source 1..20: mol_type = other DNA
ggattttgccctcctatctc

SEQ ID NO: 75221 - DNA, 20 bp, synthetic construct
  misc_feature 1..20: note = Description of Artificial Sequence: Synthetic oligonucleotide
  misc_feature 1..20: note = Target: SCN10A; (+) strand; PAM type: YTN; PAM sequence: TTG
  source 1..20: mol_type = other DNA
gattttgccctcctatctca

SEQ ID NO: 75222 - DNA, 20 bp, synthetic construct
  misc_feature 1..20: note = Description of Artificial Sequence: Synthetic oligonucleotide
  misc_feature 1..20: note = Target: SCN10A; (+) strand; PAM type: YTN; PAM sequence: TTT
  source 1..20: mol_type = other DNA
tgccctcctatctcactaaa

SEQ ID NO: 75223 - DNA, 20 bp, synthetic construct
  misc_feature 1..20: note = Description of Artificial Sequence: Synthetic oligonucleotide
  misc_feature 1..20: note = Target: SCN10A; (+) strand; PAM type: YTN; PAM sequence: TTT
  source 1..20: mol_type = other DNA
gccctcctatctcactaaaa

SEQ ID NO: 75224 - DNA, 20 bp, synthetic construct
  misc_feature 1..20: note = Description of Artificial Sequence: Synthetic oligonucleotide
  misc_feature 1..20: note = Target: SCN10A; (+) strand; PAM type: YTN; PAM sequence: TTG
  source 1..20: mol_type = other DNA
ccctcctatctcactaaaat

SEQ ID NO: 75225 - DNA, 20 bp, synthetic construct
  misc_feature 1..20: note = Description of Artificial Sequence: Synthetic oligonucleotide
  misc_feature 1..20: note = Target: SCN10A; (+) strand; PAM type: YTN; PAM sequence: CTC
  source 1..20: mol_type = other DNA
ctatctcactaaaatgcttc

SEQ ID NO: 75226 - DNA, 20 bp, synthetic construct
  misc_feature 1..20: note = Description of Artificial Sequence: Synthetic oligonucleotide
  misc_feature 1..20: note = Target: SCN10A; (+) strand; PAM type: YTN; PAM sequence: CTA
  source 1..20: mol_type = other DNA
tctcactaaaatgcttcctt

SEQ ID NO: 75227 - DNA, 20 bp, synthetic construct
  misc_feature 1..20: note = Description of Artificial Sequence: Synthetic oligonucleotide
  misc_feature 1..20: note = Target: SCN10A; (+) strand; PAM type: YTN; PAM sequence: CTC
  source 1..20: mol_type = other DNA
actaaaatgcttccttgcag

SEQ ID NO: 75228 - DNA, 20 bp, synthetic construct
  misc_feature 1..20: note = Description of Artificial Sequence: Synthetic oligonucleotide
  misc_feature 1..20: note = Target: SCN10A; (+) strand; PAM type: YTN; PAM sequence: CTA
  source 1..20: mol_type = other DNA
aaatgcttccttgcagggat

SEQ ID NO: 75229 - DNA, 20 bp, synthetic construct
  misc_feature 1..20: note = Description of Artificial Sequence: Synthetic oligonucleotide
  misc_feature 1..20: note = Target: SCN10A; (+) strand; PAM type: YTN; PAM sequence: CTT
  source 1..20: mol_type = other DNA
ccttgcagggatacaagaga

SEQ ID NO: 75230 - DNA, 20 bp, synthetic construct
  misc_feature 1..20: note = Description of Artificial Sequence: Synthetic oligonucleotide
  misc_feature 1..20: note = Target: SCN10A; (+) strand; PAM type: YTN; PAM sequence: TTC
  source 1..20: mol_type = other DNA
cttgcagggatacaagagat

SEQ ID NO: 75231 - DNA, 20 bp, synthetic construct
  misc_feature 1..20: note = Description of Artificial Sequence: Synthetic oligonucleotide
  misc_feature 1..20: note = Target: SCN10A; (+) strand; PAM type: YTN; PAM sequence: CTT
  source 1..20: mol_type = other DNA
gcagggatacaagagattgc

SEQ ID NO: 75232 - DNA, 20 bp, synthetic construct
  misc_feature 1..20: note = Description of Artificial Sequence: Synthetic oligonucleotide
  misc_feature 1..20: note = Target: SCN10A; (+) strand; PAM type: YTN; PAM sequence: TTG
  source 1..20: mol_type = other DNA
cagggatacaagagattgcc

SEQ ID NO: 75233 - DNA, 20 bp, synthetic construct
  misc_feature 1..20: note = Description of Artificial Sequence: Synthetic oligonucleotide
  misc_feature 1..20: note = Target: SCN10A; (+) strand; PAM type: YTN; PAM sequence: TTG
  source 1..20: mol_type = other DNA
ccttgtggctaaagtcaggg

SEQ ID NO: 75234 - DNA, 20 bp, synthetic construct
  misc_feature 1..20: note = Description of Artificial Sequence: Synthetic oligonucleotide
  misc_feature 1..20: note = Target: SCN10A; (+) strand; PAM type: YTN; PAM sequence: CTT
  source 1..20: mol_type = other DNA
gtggctaaagtcagggggcc

SEQ ID NO: 75235 - DNA, 20 bp, synthetic construct
  misc_feature 1..20: note = Description of Artificial Sequence: Synthetic oligonucleotide
  misc_feature 1..20: note = Target: SCN10A; (+) strand; PAM type: YTN; PAM sequence: TTG
  source 1..20: mol_type = other DNA
tggctaaagtcagggggccc

SEQ ID NO: 75236 - DNA, 20 bp, synthetic construct
  misc_feature 1..20: note = Description of Artificial Sequence: Synthetic oligonucleotide
  misc_feature 1..20: note = Target: SCN10A; (+) strand; PAM type: YTN; PAM sequence: CTA
  source 1..20: mol_type = other DNA
aagtcagggggcccttctca

SEQ ID NO: 75237 - DNA, 20 bp, synthetic construct
  misc_feature 1..20: note = Description of Artificial Sequence: Synthetic oligonucleotide
  misc_feature 1..20: note = Target: SCN10A; (+) strand; PAM type: YTN; PAM sequence: CTT
  source 1..20: mol_type = other DNA
ctcagttcttgtcttttttg

SEQ ID NO: 75238 - DNA, 20 bp, synthetic construct
  misc_feature 1..20: note = Description of Artificial Sequence: Synthetic oligonucleotide
  misc_feature 1..20: note = Target: SCN10A; (+) strand; PAM type: YTN; PAM sequence: TTC
  source 1..20: mol_type = other DNA
tcagttcttgtcttttttgt

SEQ ID NO: 75239 - DNA, 20 bp, synthetic construct
  misc_feature 1..20: note = Description of Artificial Sequence: Synthetic oligonucleotide
  misc_feature 1..20: note = Target: SCN10A; (+) strand; PAM type: YTN; PAM sequence: CTC
  source 1..20: mol_type = other DNA
agttcttgtcttttttgttt

SEQ ID NO: 75240 - DNA, 20 bp, synthetic construct
  misc_feature 1..20: note = Description of Artificial Sequence: Synthetic oligonucleotide
  misc_feature 1..20: note = Target: SCN10A; (+) strand; PAM type: YTN; PAM sequence: TTC
  source 1..20: mol_type = other DNA
ttgtcttttttgtttttttc

SEQ ID NO: 75241 - DNA, 20 bp, synthetic construct
  misc_feature 1..20: note = Description of Artificial Sequence: Synthetic oligonucleotide
  misc_feature 1..20: note = Target: SCN10A; (+) strand; PAM type: YTN; PAM sequence: CTT
  source 1..20: mol_type = other DNA
gtcttttttgtttttttctt

SEQ ID NO: 75242 - DNA, 20 bp, synthetic construct
  misc_feature 1..20: note = Description of Artificial Sequence: Synthetic oligonucleotide
  misc_feature 1..20: note = Target: SCN10A; (+) strand; PAM type: YTN; PAM sequence: TTG
  source 1..20: mol_type = other DNA
tcttttttgtttttttcttt

SEQ ID NO: 75243 - DNA, 20 bp, synthetic construct
  misc_feature 1..20: note = Description of Artificial Sequence: Synthetic oligonucleotide
  misc_feature 1..20: note = Target: SCN10A; (+) strand; PAM type: YTN; PAM sequence: CTT
  source 1..20: mol_type = other DNA
ttttgtttttttctttttct

SEQ ID NO: 75244 - DNA, 20 bp, synthetic construct
  misc_feature 1..20: note = Description of Artificial Sequence: Synthetic oligonucleotide
  misc_feature 1..20: note = Target: SCN10A; (+) strand; PAM type: YTN; PAM sequence: TTT
  source 1..20: mol_type = other DNA
tttgtttttttctttttctt

SEQ ID NO: 75245 - DNA, 20 bp, synthetic construct
  misc_feature 1..20: note = Description of Artificial Sequence: Synthetic oligonucleotide
  misc_feature 1..20: note = Target: SCN10A; (+) strand; PAM type: YTN; PAM sequence: TTT
  source 1..20: mol_type = other DNA
ttgtttttttctttttcttt

SEQ ID NO: 75246 - DNA, 20 bp, synthetic construct
  misc_feature 1..20: note = Description of Artificial Sequence: Synthetic oligonucleotide
  misc_feature 1..20: note = Target: SCN10A; (+) strand; PAM type: YTN; PAM sequence: TTT
  source 1..20: mol_type = other DNA
tgtttttttctttttctttt

SEQ ID NO: 75247 - DNA, 20 bp, synthetic construct
  misc_feature 1..20: note = Description of Artificial Sequence: Synthetic oligonucleotide
  misc_feature 1..20: note = Target: SCN10A; (+) strand; PAM type: YTN; PAM sequence: TTT
  source 1..20: mol_type = other DNA
gtttttttctttttcttttt

SEQ ID NO: 75248 - DNA, 20 bp, synthetic construct
  misc_feature 1..20: note = Description of Artificial Sequence: Synthetic oligonucleotide
  misc_feature 1..20: note = Target: SCN10A; (+) strand; PAM type: YTN; PAM sequence: TTG
  source 1..20: mol_type = other DNA
tttttttctttttctttttc

SEQ ID NO: 75249 - DNA, 20 bp, synthetic construct
  misc_feature 1..20: note = Description of Artificial Sequence: Synthetic oligonucleotide
  misc_feature 1..20: note = Target: SCN10A; (+) strand; PAM type: YTN; PAM sequence: TTT
  source 1..20: mol_type = other DNA
ttttctttttctttttcttt

SEQ ID NO: 75250 - DNA, 20 bp, synthetic construct
  misc_feature 1..20: note = Description of Artificial Sequence: Synthetic oligonucleotide
  misc_feature 1..20: note = Target: SCN10A; (+) strand; PAM type: YTN; PAM sequence: TTT
  source 1..20: mol_type = other DNA
tttctttttctttttctttt

SEQ ID NO: 75251 - DNA, 20 bp, synthetic construct
  misc_feature 1..20: note = Description of Artificial Sequence: Synthetic oligonucleotide
  misc_feature 1..20: note = Target: SCN10A; (+) strand; PAM type: YTN; PAM sequence: TTT
  source 1..20: mol_type = other DNA
ttctttttctttttcttttt

SEQ ID NO: 75252 - DNA, 20 bp, synthetic construct
  misc_feature 1..20: note = Description of Artificial Sequence: Synthetic oligonucleotide
  misc_feature 1..20: note = Target: SCN10A; (+) strand; PAM type: YTN; PAM sequence: TTT
  source 1..20: mol_type = other DNA
tctttttctttttctttttt

SEQ ID NO: 75253 - DNA, 20 bp, synthetic construct
  misc_feature 1..20: note = Description of Artificial Sequence: Synthetic oligonucleotide
  misc_feature 1..20: note = Target: SCN10A; (+) strand; PAM type: YTN; PAM sequence: TTT
  source 1..20: mol_type = other DNA
ctttttctttttcttttttt

SEQ ID NO: 75254 - DNA, 20 bp, synthetic construct
  misc_feature 1..20: note = Description of Artificial Sequence: Synthetic oligonucleotide
  misc_feature 1..20: note = Target: SCN10A; (+) strand; PAM type: YTN; PAM sequence: TTC
  source 1..20: mol_type = other DNA
tttttctttttctttttttt

SEQ ID NO: 75255 - DNA, 20 bp, synthetic construct
  misc_feature 1..20: note = Description of Artificial Sequence: Synthetic oligonucleotide
  misc_feature 1..20: note = Target: SCN10A; (+) strand; PAM type: YTN; PAM sequence: CTT
  source 1..20: mol_type = other DNA
tttctttttctttttttttt

SEQ ID NO: 75256 - DNA, 20 bp, synthetic construct
  misc_feature 1..20: note = Description of Artificial Sequence: Synthetic oligonucleotide
  misc_feature 1..20: note = Target: SCN10A; (+) strand; PAM type: YTN; PAM sequence: TTT
  source 1..20: mol_type = other DNA
ttctttttcttttttttttt

SEQ ID NO: 75257 - DNA, 20 bp, synthetic construct
  misc_feature 1..20: note = Description of Artificial Sequence: Synthetic oligonucleotide
  misc_feature 1..20: note = Target: SCN10A; (+) strand; PAM type: YTN; PAM sequence: TTT
  source 1..20: mol_type = other DNA
tctttttctttttttttttt

SEQ ID NO: 75258 - DNA, 20 bp, synthetic construct
  misc_feature 1..20: note = Description of Artificial Sequence: Synthetic oligonucleotide
  misc_feature 1..20: note = Target: SCN10A; (+) strand; PAM type: YTN; PAM sequence: TTT
  source 1..20: mol_type = other DNA
ctttttcttttttttttttt

SEQ ID NO: 75259 - DNA, 20 bp, synthetic construct
  misc_feature 1..20: note = Description of Artificial Sequence: Synthetic oligonucleotide
  misc_feature 1..20: note = Target: SCN10A; (+) strand; PAM type: YTN; PAM sequence: TTC
  source 1..20: mol_type = other DNA
tttttctttttttttttttg

SEQ ID NO: 75260 - DNA, 20 bp, synthetic construct
  misc_feature 1..20: note = Description of Artificial Sequence: Synthetic oligonucleotide
  misc_feature 1..20: note = Target: SCN10A; (+) strand; PAM type: YTN; PAM sequence: CTT
  source 1..20: mol_type = other DNA
tttctttttttttttttgag

SEQ ID NO: 75261 - DNA, 20 bp, synthetic construct
  misc_feature 1..20: note = Description of Artificial Sequence: Synthetic oligonucleotide
  misc_feature 1..20: note = Target: SCN10A; (+) strand; PAM type: YTN; PAM sequence: TTT
  source 1..20: mol_type = other DNA
ttctttttttttttttgaga

SEQ ID NO: 75262 - DNA, 20 bp, synthetic construct
  misc_feature 1..20: note = Description of Artificial Sequence: Synthetic oligonucleotide
  misc_feature 1..20: note = Target: SCN10A; (+) strand; PAM type: YTN; PAM sequence: TTT
  source 1..20: mol_type = other DNA
tctttttttttttttgagac

SEQ ID NO: 75263 - DNA, 20 bp, synthetic construct
  misc_feature 1..20: note = Description of Artificial Sequence: Synthetic oligonucleotide
  misc_feature 1..20: note = Target: SCN10A; (+) strand; PAM type: YTN; PAM sequence: TTT
  source 1..20: mol_type = other DNA
ctttttttttttttgagaca

SEQ ID NO: 75264 - DNA, 20 bp, synthetic construct
  misc_feature 1..20: note = Description of Artificial Sequence: Synthetic oligonucleotide
  misc_feature 1..20: note = Target: SCN10A; (+) strand; PAM type: YTN; PAM sequence: TTC
  source 1..20: mol_type = other DNA
tttttttttttttgagacag

SEQ ID NO: 75265 - DNA, 20 bp, synthetic construct
  misc_feature 1..20: note = Description of Artificial Sequence: Synthetic oligonucleotide
  misc_feature 1..20: note = Target: SCN10A; (+) strand; PAM type: YTN; PAM sequence: CTT
  source 1..20: mol_type = other DNA
tttttttttttgagacaggg

SEQ ID NO: 75266 - DNA, 20 bp, synthetic construct
  misc_feature 1..20: note = Description of Artificial Sequence: Synthetic oligonucleotide
  misc_feature 1..20: note = Target: SCN10A; (+) strand; PAM type: YTN; PAM sequence: TTT
  source 1..20: mol_type = other DNA
ttttttttttgagacagggt

SEQ ID NO: 75267 - DNA, 20 bp, synthetic construct
  misc_feature 1..20: note = Description of Artificial Sequence: Synthetic oligonucleotide
  misc_feature 1..20: note = Target: SCN10A; (+) strand; PAM type: YTN; PAM sequence: TTT
  source 1..20: mol_type = other DNA
tttttttttgagacagggta

SEQ ID NO: 75268 - DNA, 20 bp, synthetic construct
  misc_feature 1..20: note = Description of Artificial Sequence: Synthetic oligonucleotide
  misc_feature 1..20: note = Target: SCN10A; (+) strand; PAM type: YTN; PAM sequence: TTT
  source 1..20: mol_type = other DNA
ttttttttgagacagggtat

SEQ ID NO: 75269 - DNA, 20 bp, synthetic construct
  misc_feature 1..20: note = Description of Artificial Sequence: Synthetic oligonucleotide
  misc_feature 1..20: note = Target: SCN10A; (+) strand; PAM type: YTN; PAM sequence: TTT
  source 1..20: mol_type = other DNA
tttttttgagacagggtatc

SEQ ID NO: 75270 - DNA, 20 bp, synthetic construct
  misc_feature 1..20: note = Description of Artificial Sequence: Synthetic oligonucleotide
  misc_feature 1..20: note = Target: SCN10A; (+) strand; PAM type: YTN; PAM sequence: TTT
  source 1..20: mol_type = other DNA
ttttttgagacagggtatca

SEQ ID NO: 75271 - DNA, 20 bp, synthetic construct
  misc_feature 1..20: note = Description of Artificial Sequence: Synthetic oligonucleotide
  misc_feature 1..20: note = Target: SCN10A; (+) strand; PAM type: YTN; PAM sequence: TTT
  source 1..20: mol_type = other DNA
tttttgagacagggtatcac

SEQ ID NO: 75272 - DNA, 20 bp, synthetic construct
  misc_feature 1..20: note = Description of Artificial Sequence: Synthetic oligonucleotide
  misc_feature 1..20: note = Target: SCN10A; (+) strand; PAM type: YTN; PAM sequence: TTT
  source 1..20: mol_type = other DNA
ttttgagacagggtatcact

SEQ ID NO: 75273 - DNA, 20 bp, synthetic construct
  misc_feature 1..20: note = Description of Artificial Sequence: Synthetic oligonucleotide
  misc_feature 1..20: note = Target: SCN10A; (+) strand; PAM type: YTN; PAM sequence: TTT
  source 1..20: mol_type = other DNA
tttgagacagggtatcactg

SEQ ID NO: 75274 - DNA, 20 bp, synthetic construct
  misc_feature 1..20: note = Description of Artificial Sequence: Synthetic oligonucleotide
  misc_feature 1..20: note = Target: SCN10A; (+) strand; PAM type: YTN; PAM sequence: TTT
  source 1..20: mol_type = other DNA
ttgagacagggtatcactgt

SEQ ID NO: 75275 - DNA, 20 bp, synthetic construct
  misc_feature 1..20: note = Description of Artificial Sequence: Synthetic oligonucleotide
  misc_feature 1..20: note = Target: SCN10A; (+) strand; PAM type: YTN; PAM sequence: TTT
  source 1..20: mol_type = other DNA
tgagacagggtatcactgtc

SEQ ID NO: 75276 - DNA, 20 bp, synthetic construct
  misc_feature 1..20: note = Description of Artificial Sequence: Synthetic oligonucleotide
  misc_feature 1..20: note = Target: SCN10A; (+) strand; PAM type: YTN; PAM sequence: TTT
  source 1..20: mol_type = other DNA
gagacagggtatcactgtca

SEQ ID NO: 75277 - DNA, 20 bp, synthetic construct
  misc_feature 1..20: note = Description of Artificial Sequence: Synthetic oligonucleotide
  misc_feature 1..20: note = Target: SCN10A; (+) strand; PAM type: YTN; PAM sequence: TTG
  source 1..20: mol_type = other DNA
agacagggtatcactgtcac

SEQ ID NO: 75278 - DNA, 20 bp, synthetic construct
  misc_feature 1..20: note = Description of Artificial Sequence: Synthetic oligonucleotide
  misc_feature 1..20: note = Target: SCN10A; (+) strand; PAM type: YTN; PAM sequence: CTG
  source 1..20: mol_type = other DNA
tcacccggactagagtgcag

SEQ ID NO: 75279 - DNA, 20 bp, synthetic construct
  misc_feature 1..20: note = Description of Artificial Sequence: Synthetic oligonucleotide
  misc_feature 1..20: note = Target: SCN10A; (+) strand; PAM type: YTN; PAM sequence: CTA
  source 1..20: mol_type = other DNA
gagtgcagtggtgcaatctc

SEQ ID NO: 75280 - DNA, 20 bp, synthetic construct
  misc_feature 1..20: note = Description of Artificial Sequence: Synthetic oligonucleotide
  misc_feature 1..20: note = Target: SCN10A; (+) strand; PAM type: YTN; PAM sequence: CTC
  source 1..20: mol_type = other DNA
tgctcactgcaacctctgtc

SEQ ID NO: 75281 - DNA, 20 bp, synthetic construct
  misc_feature 1..20: note = Description of Artificial Sequence: Synthetic oligonucleotide
  misc_feature 1..20: note = Target: SCN10A; (+) strand; PAM type: YTN; PAM sequence: CTG
  source 1..20: mol_type = other DNA
ctcactgcaacctctgtctc

SEQ ID NO: 75282 - DNA, 20 bp, synthetic construct
  misc_feature 1..20: note = Description of Artificial Sequence: Synthetic oligonucleotide
  misc_feature 1..20: note = Target: SCN10A; (+) strand; PAM type: YTN; PAM sequence: CTC
  source 1..20: mol_type = other DNA
actgcaacctctgtctcctg

SEQ ID NO: 75283 - DNA, 20 bp, synthetic construct
  misc_feature 1..20: note = Description of Artificial Sequence: Synthetic oligonucleotide
  misc_feature 1..20: note = Target: SCN10A; (+) strand; PAM type: YTN; PAM sequence: CTG
  source 1..20: mol_type = other DNA
caacctctgtctcctgggct

SEQ ID NO: 75284 - DNA, 20 bp, synthetic construct
  misc_feature 1..20: note = Description of Artificial Sequence: Synthetic oligonucleotide
  misc_feature 1..20: note = Target: SCN10A; (+) strand; PAM type: YTN; PAM sequence: CTC
  source 1..20: mol_type = other DNA
tgtctcctgggctcaagcaa

SEQ ID NO: 75285 - DNA, 20 bp, synthetic construct
  misc_feature 1..20: note = Description of Artificial Sequence: Synthetic oligonucleotide
  misc_feature 1..20: note = Target: SCN10A; (+) strand; PAM type: YTN; PAM sequence: CTG
  source 1..20: mol_type = other DNA
tctcctgggctcaagcaatt

SEQ ID NO: 75286 - DNA, 20 bp, synthetic construct
  misc_feature 1..20: note = Description of Artificial Sequence: Synthetic oligonucleotide
  misc_feature 1..20: note = Target: SCN10A; (+) strand; PAM type: YTN; PAM sequence: CTC
  source 1..20: mol_type = other DNA
ctgggctcaagcaattctcc

SEQ ID NO: 75287 - DNA, 20 bp, synthetic construct
  misc_feature 1..20: note = Description of Artificial Sequence: Synthetic oligonucleotide
  misc_feature 1..20: note = Target: SCN10A; (+) strand; PAM type: YTN; PAM sequence: CTG
  source 1..20: mol_type = other DNA
ggctcaagcaattctcccac

SEQ ID NO: 75288 - DNA, 20 bp, synthetic construct
  misc_feature 1..20: note = Description of Artificial Sequence: Synthetic oligonucleotide
  misc_feature 1..20: note = Target: SCN10A; (+) strand; PAM type: YTN; PAM sequence: CTC
  source 1..20: mol_type = other DNA
aagcaattctcccacctcag

SEQ ID NO: 75289 - DNA, 20 bp, synthetic construct
  misc_feature 1..20: note = Description of Artificial Sequence: Synthetic oligonucleotide
  misc_feature 1..20: note = Target: SCN10A; (+) strand; PAM type: YTN; PAM sequence: TTC
  source 1..20: mol_type = other DNA
tcccacctcagcctcccgaa

SEQ ID NO: 75290 - DNA, 20 bp, synthetic construct
  misc_feature 1..20: note = Description of Artificial Sequence: Synthetic oligonucleotide
  misc_feature 1..20: note = Target: SCN10A; (+) strand; PAM type: YTN; PAM sequence: CTC
  source 1..20: mol_type = other DNA
ccacctcagcctcccgaata

SEQ ID NO: 75291 - DNA, 20 bp, synthetic construct
  misc_feature 1..20: note = Description of Artificial Sequence: Synthetic oligonucleotide
  misc_feature 1..20: note = Target: SCN10A; (+) strand; PAM type: YTN; PAM sequence: CTC
  source 1..20: mol_type = other DNA
agcctcccgaatagctgggc

SEQ ID NO: 75292 - DNA, 20 bp, synthetic construct
  misc_feature 1..20: note = Description of Artificial Sequence: Synthetic oligonucleotide
  misc_feature 1..20: note = Target: SCN10A; (+) strand; PAM type: YTN; PAM sequence: CTC
  source 1..20: mol_type = other DNA
ccgaatagctgggctatagg

SEQ ID NO: 75293 - DNA, 20 bp, synthetic construct
  misc_feature 1..20: note = Description of Artificial Sequence: Synthetic oligonucleotide
  misc_feature 1..20: note = Target: SCN10A; (+) strand; PAM type: YTN; PAM sequence: CTG
  source 1..20: mol_type = other DNA
ggctataggcacatgtcacc

SEQ ID NO: 75294 - DNA, 20 bp, synthetic construct
  misc_feature 1..20: note = Description of Artificial Sequence: Synthetic oligonucleotide
  misc_feature 1..20: note = Target: SCN10A; (+) strand; PAM type: YTN; PAM sequence: CTA
  source 1..20: mol_type = other DNA
taggcacatgtcaccacact

SEQ ID NO: 75295 - DNA, 20 bp, synthetic construct
  misc_feature 1..20: note = Description of Artificial Sequence: Synthetic oligonucleotide
  misc_feature 1..20: note = Target: SCN10A; (+) strand; PAM type: YTN; PAM sequence: CTC
  source 1..20: mol_type = other DNA
ggctagttttgaaaaaattt

SEQ ID NO: 75296 - DNA, 20 bp, synthetic construct
  misc_feature 1..20: note = Description of Artificial Sequence: Synthetic oligonucleotide
  misc_feature 1..20: note = Target: SCN10A; (+) strand; PAM type: YTN; PAM sequence: CTA
  source 1..20: mol_type = other DNA
gttttgaaaaaatttttttg

SEQ ID NO: 75297 - DNA, 20 bp, synthetic construct
  misc_feature 1..20: note = Description of Artificial Sequence: Synthetic oligonucleotide
  misc_feature 1..20: note = Target: SCN10A; (+) strand; PAM type: YTN; PAM sequence: TTT
  source 1..20: mol_type = other DNA
tgaaaaaatttttttgtagg

SEQ ID NO: 75298 - DNA, 20 bp, synthetic construct
  misc_feature 1..20: note = Description of Artificial Sequence: Synthetic oligonucleotide
  misc_feature 1..20: note = Target: SCN10A; (+) strand; PAM type: YTN; PAM sequence: TTT
  source 1..20: mol_type = other DNA
gaaaaaatttttttgtaggc

SEQ ID NO: 75299 - DNA, 20 bp, synthetic construct
  misc_feature 1..20: note = Description of Artificial Sequence: Synthetic oligonucleotide
  misc_feature 1..20: note = Target: SCN10A; (+) strand; PAM type: YTN; PAM sequence: TTG
  source 1..20: mol_type = other DNA
aaaaaatttttttgtaggca

SEQ ID NO: 75300 - DNA, 20 bp, synthetic construct
  misc_feature 1..20: note = Description of Artificial Sequence: Synthetic oligonucleotide
  misc_feature 1..20: note = Target: SCN10A; (+) strand; PAM type: YTN; PAM sequence: TTT
  source 1..20: mol_type = other DNA
ttttgtaggcagtgtaccac

SEQ ID NO: 75301 - DNA, 20 bp, synthetic construct
  misc_feature 1..20: note = Description of Artificial Sequence: Synthetic oligonucleotide
  misc_feature 1..20: note = Target: SCN10A; (+) strand; PAM type: YTN; PAM sequence: TTT
  source 1..20: mol_type = other DNA
tttgtaggcagtgtaccact

SEQ ID NO: 75302 - DNA, 20 bp, synthetic construct
  misc_feature 1..20: note = Description of Artificial Sequence: Synthetic oligonucleotide
  misc_feature 1..20: note = Target: SCN10A; (+) strand; PAM type: YTN; PAM sequence: TTT
  source 1..20: mol_type = other DNA
ttgtaggcagtgtaccacta

SEQ ID NO: 75303 - DNA, 20 bp, synthetic construct
  misc_feature 1..20: note = Description of Artificial Sequence: Synthetic oligonucleotide
  misc_feature 1..20: note = Target: SCN10A; (+) strand; PAM type: YTN; PAM sequence: TTT
  source 1..20: mol_type = other DNA
tgtaggcagtgtaccactat

SEQ ID NO: 75304 - DNA, 20 bp, synthetic construct
  misc_feature 1..20: note = Description of Artificial Sequence: Synthetic oligonucleotide
  misc_feature 1..20: note = Target: SCN10A; (+) strand; PAM type: YTN; PAM sequence: TTT
  source 1..20: mol_type = other DNA
gtaggcagtgtaccactata

SEQ ID NO: 75305 - DNA, 20 bp, synthetic construct
  misc_feature 1..20: note = Description of Artificial Sequence: Synthetic oligonucleotide
  misc_feature 1..20: note = Target: SCN10A; (+) strand; PAM type: YTN; PAM sequence: TTG
  source 1..20: mol_type = other DNA
taggcagtgtaccactatat

SEQ ID NO: 75306 - DNA, 20 bp, synthetic construct
  misc_feature 1..20: note = Description of Artificial Sequence: Synthetic oligonucleotide
  misc_feature 1..20: note = Target: SCN10A; (+) strand; PAM type: YTN; PAM sequence: CTA
  source 1..20: mol_type = other DNA
tattgtccaggcccatctca

SEQ ID NO: 75307 - DNA, 20 bp, synthetic construct
  misc_feature 1..20: note = Description of Artificial Sequence: Synthetic oligonucleotide
  misc_feature 1..20: note = Target: SCN10A; (+) strand; PAM type: YTN; PAM sequence: TTG
  source 1..20: mol_type = other DNA
tccaggcccatctcagttct

SEQ ID NO: 75308 - DNA, 20 bp, synthetic construct
  misc_feature 1..20: note = Description of Artificial Sequence: Synthetic oligonucleotide
  misc_feature 1..20: note = Target: SCN10A; (+) strand; PAM type: YTN; PAM sequence: CTC
  source 1..20: mol_type = other DNA
agttcttatcttgatggtcc

SEQ ID NO: 75309 - DNA, 20 bp, synthetic construct
  misc_feature 1..20: note = Description of Artificial Sequence: Synthetic oligonucleotide
  misc_feature 1..20: note = Target: SCN10A; (+) strand; PAM type: YTN; PAM sequence: TTC
  source 1..20: mol_type = other DNA
ttatcttgatggtcctattg

SEQ ID NO: 75310 - DNA, 20 bp, synthetic construct
  misc_feature 1..20: note = Description of Artificial Sequence: Synthetic oligonucleotide
  misc_feature 1..20: note = Target: SCN10A; (+) strand; PAM type: YTN; PAM sequence: CTT
  source 1..20: mol_type = other DNA
atcttgatggtcctattggc

SEQ ID NO: 75311 - DNA, 20 bp, synthetic construct
  misc_feature 1..20: note = Description of Artificial Sequence: Synthetic oligonucleotide
  misc_feature 1..20: note = Target: SCN10A; (+) strand; PAM type: YTN; PAM sequence: TTA
  source 1..20: mol_type = other DNA
tcttgatggtcctattggct

SEQ ID NO: 75312 - DNA, 20 bp, synthetic construct
  misc_feature 1..20: note = Description of Artificial Sequence: Synthetic oligonucleotide
  misc_feature 1..20: note = Target: SCN10A; (+) strand; PAM type: YTN; PAM sequence: CTT
  source 1..20: mol_type = other DNA
gatggtcctattggctgttt

SEQ ID NO: 75313 - DNA, 20 bp, synthetic construct
  misc_feature 1..20: note = Description of Artificial Sequence: Synthetic oligonucleotide
  misc_feature 1..20: note = Target: SCN10A; (+) strand; PAM type: YTN; PAM sequence: TTG
  source 1..20: mol_type = other DNA
atggtcctattggctgtttt

SEQ ID NO: 75314 - DNA, 20 bp, synthetic construct
  misc_feature 1..20: note = Description of Artificial Sequence: Synthetic oligonucleotide
  misc_feature 1..20: note = Target: SCN10A; (+) strand; PAM type: YTN; PAM sequence: CTA
  source 1..20: mol_type = other DNA
ttggctgttttgacaatttc

SEQ ID NO: 75315 - DNA, 20 bp, synthetic construct
  misc_feature 1..20: note = Description of Artificial Sequence: Synthetic oligonucleotide
  misc_feature 1..20: note = Target: SCN10A; (+) strand; PAM type: YTN; PAM sequence: TTG
  source 1..20: mol_type = other DNA
gctgttttgacaatttcctc

SEQ ID NO: 75316 - DNA, 20 bp, synthetic construct
  misc_feature 1..20: note = Description of Artificial Sequence: Synthetic oligonucleotide
  misc_feature 1..20: note = Target: SCN10A; (+) strand; PAM type: YTN; PAM sequence: CTG
  source 1..20: mol_type = other DNA
ttttgacaatttcctcctta

SEQ ID NO: 75317 - DNA, 20 bp, synthetic construct
  misc_feature 1..20: note = Description of Artificial Sequence: Synthetic oligonucleotide
  misc_feature 1..20: note = Target: SCN10A; (+) strand; PAM type: YTN; PAM sequence: TTT
  source 1..20: mol_type = other DNA
tgacaatttcctccttaaaa

SEQ ID NO: 75318 - DNA, 20 bp, synthetic construct
  misc_feature 1..20: note = Description of Artificial Sequence: Synthetic oligonucleotide
  misc_feature 1..20: note = Target: SCN10A; (+) strand; PAM type: YTN; PAM sequence: TTT
  source 1..20: mol_type = other DNA
gacaatttcctccttaaaat

SEQ ID NO: 75319 - DNA, 20 bp, synthetic construct
  misc_feature 1..20: note = Description of Artificial Sequence: Synthetic oligonucleotide
  misc_feature 1..20: note = Target: SCN10A; (+) strand; PAM type: YTN; PAM sequence: TTG
  source 1..20: mol_type = other DNA
acaatttcctccttaaaata

SEQ ID NO: 75320 - DNA, 20 bp, synthetic construct
  misc_feature 1..20: note = Description of Artificial Sequence: Synthetic oligonucleotide
  misc_feature 1..20: note = Target: SCN10A; (+) strand; PAM type: YTN; PAM sequence: TTT
  source 1..20: mol_type = other DNA
cctccttaaaatactgtata

SEQ ID NO: 75321 - DNA, 20 bp, synthetic construct
  misc_feature 1..20: note = Description of Artificial Sequence: Synthetic oligonucleotide
  misc_feature 1..20: note = Target: SCN10A; (+) strand; PAM type: YTN; PAM sequence: TTC
  source 1..20: mol_type = other DNA
ctccttaaaatactgtatat

SEQ ID NO: 75322 - DNA, 20 bp, synthetic construct
  misc_feature 1..20: note = Description of Artificial Sequence: Synthetic oligonucleotide
  misc_feature 1..20: note = Target: SCN10A; (+) strand; PAM type: YTN; PAM sequence: CTC
  source 1..20: mol_type = other DNA
cttaaaatactgtatatttt

SEQ ID NO: 75323 - DNA, 20 bp, synthetic construct
  misc_feature 1..20: note = Description of Artificial Sequence: Synthetic oligonucleotide
  misc_feature 1..20: note = Target: SCN10A; (+) strand; PAM type: YTN; PAM sequence: CTT
  source 1..20: mol_type = other DNA
aaaatactgtatattttggc

SEQ ID NO: 75324 - DNA, 20 bp, synthetic construct
  misc_feature 1..20: note = Description of Artificial Sequence: Synthetic oligonucleotide
  misc_feature 1..20: note = Target: SCN10A; (+) strand; PAM type: YTN; PAM sequence: TTA
  source 1..20: mol_type = other DNA
aaatactgtatattttggct

SEQ ID NO: 75325 - DNA, 20 bp, synthetic construct
  misc_feature 1..20: note = Description of Artificial Sequence: Synthetic oligonucleotide
  misc_feature 1..20: note = Target: SCN10A; (+) strand; PAM type: YTN; PAM sequence: CTG
  source 1..20: mol_type = other DNA
tatattttggctaccatgac

SEQ ID NO: 75326 - DNA, 20 bp, synthetic construct
  misc_feature 1..20: note = Description of Artificial Sequence: Synthetic oligonucleotide
  misc_feature 1..20: note = Target: SCN10A; (+) strand; PAM type: YTN; PAM sequence: TTT
  source 1..20: mol_type = other DNA
tggctaccatgacactctct

SEQ ID NO: 75327 - DNA, 20 bp, synthetic construct
  misc_feature 1..20: note = Description of Artificial Sequence: Synthetic oligonucleotide
  misc_feature 1..20: note = Target: SCN10A; (+) strand; PAM type: YTN; PAM sequence: TTT
  source 1..20: mol_type = other DNA
ggctaccatgacactctctt

SEQ ID NO: 75328 - DNA, 20 bp, synthetic construct
  misc_feature 1..20: note = Description of Artificial Sequence: Synthetic oligonucleotide
  misc_feature 1..20: note = Target: SCN10A; (+) strand; PAM type: YTN; PAM sequence: TTG
  source 1..20: mol_type = other DNA
gctaccatgacactctcttg

SEQ ID NO: 75329 - DNA, 20 bp, synthetic construct
  misc_feature 1..20: note = Description of Artificial Sequence: Synthetic oligonucleotide
  misc_feature 1..20: note = Target: SCN10A; (+) strand; PAM type: YTN; PAM sequence: CTA
  source 1..20: mol_type = other DNA
ccatgacactctcttggttt

SEQ ID NO: 75330 - DNA, 20 bp, synthetic construct
  misc_feature 1..20: note = Description of Artificial Sequence: Synthetic oligonucleotide
  misc_feature 1..20: note = Target: SCN10A; (+) strand; PAM type: YTN; PAM sequence: CTC
  source 1..20: mol_type = other DNA
tcttggttttcctaactttc

SEQ ID NO: 75331 - DNA, 20 bp, synthetic construct
  misc_feature 1..20: note = Description of Artificial Sequence: Synthetic oligonucleotide
  misc_feature 1..20: note = Target: SCN10A; (+) strand; PAM type: YTN; PAM sequence: CTC
  source 1..20: mol_type = other DNA
ttggttttcctaactttctc

SEQ ID NO: 75332 - DNA, 20 bp, synthetic construct
  misc_feature 1..20: note = Description of Artificial Sequence: Synthetic oligonucleotide
  misc_feature 1..20: note = Target: SCN10A; (+) strand; PAM type: YTN; PAM sequence: CTT
  source 1..20: mol_type = other DNA
ggttttcctaactttctctc

SEQ ID NO: 75333 - DNA, 20 bp, synthetic construct
  misc_feature 1..20: note = Description of Artificial Sequence: Synthetic oligonucleotide
  misc_feature 1..20: note = Target: SCN10A; (+) strand; PAM type: YTN; PAM sequence: TTG
  source 1..20: mol_type = other DNA
gttttcctaactttctctct

SEQ ID NO: 75334 - DNA, 20 bp, synthetic construct
  misc_feature 1..20: note = Description of Artificial Sequence: Synthetic oligonucleotide
  misc_feature 1..20: note = Target: SCN10A; (+) strand; PAM type: YTN; PAM sequence: TTT
  source 1..20: mol_type = other DNA
tcctaactttctctcttctc

SEQ ID NO: 75335 - DNA, 20 bp, synthetic construct
  misc_feature 1..20: note = Description of Artificial Sequence: Synthetic oligonucleotide
  misc_feature 1..20: note = Target: SCN10A; (+) strand; PAM type: YTN; PAM sequence: TTT
  source 1..20: mol_type = other DNA
cctaactttctctcttctcc

SEQ ID NO: 75336 - DNA, 20 bp, synthetic construct
  misc_feature 1..20: note = Description of Artificial Sequence: Synthetic oligonucleotide
  misc_feature 1..20: note = Target: SCN10A; (+) strand; PAM type: YTN; PAM sequence: TTC
  source 1..20: mol_type = other DNA
ctaactttctctcttctcct

SEQ ID NO: 75337 - DNA, 20 bp, synthetic construct
  misc_feature 1..20: note = Description of Artificial Sequence: Synthetic oligonucleotide
  misc_feature 1..20: note = Target: SCN10A; (+) strand; PAM type: YTN; PAM sequence: CTA
  source 1..20: mol_type = other DNA
actttctctcttctccttct

SEQ ID NO: 75338 - DNA, 20 bp, synthetic construct
  misc_feature 1..20: note = Description of Artificial Sequence: Synthetic oligonucleotide
  misc_feature 1..20: note = Target: SCN10A; (+) strand; PAM type: YTN; PAM sequence: CTT
  source 1..20: mol_type = other DNA
tctctcttctccttctcagt

SEQ ID NO: 75339 - DNA, 20 bp, synthetic construct
  misc_feature 1..20: note = Description of Artificial Sequence: Synthetic oligonucleotide
  misc_feature 1..20: note = Target: SCN10A; (+) strand; PAM type: YTN; PAM sequence: TTT
  source 1..20: mol_type = other DNA
ctctcttctccttctcagtc

SEQ ID NO: 75340 - DNA, 20 bp, synthetic construct
  misc_feature 1..20: note = Description of Artificial Sequence: Synthetic oligonucleotide
  misc_feature 1..20: note = Target: SCN10A; (+) strand; PAM type: YTN; PAM sequence: TTC
  source 1..20: mol_type = other DNA
tctcttctccttctcagtct

SEQ ID NO: 75341 - DNA, 20 bp, synthetic construct
  misc_feature 1..20: note = Description of Artificial Sequence: Synthetic oligonucleotide
  misc_feature 1..20: note = Target: SCN10A; (+) strand; PAM type: YTN; PAM sequence: CTC
  source 1..20: mol_type = other DNA
tcttctccttctcagtctct

SEQ ID NO: 75342 - DNA, 20 bp, synthetic construct
  misc_feature 1..20: note = Description of Artificial Sequence: Synthetic oligonucleotide
  misc_feature 1..20: note = Target: SCN10A; (+) strand; PAM type: YTN; PAM sequence: CTC
  source 1..20: mol_type = other DNA
ttctccttctcagtctctcc

SEQ ID NO: 75343 - DNA, 20 bp, synthetic construct
  misc_feature 1..20: note = Description of Artificial Sequence: Synthetic oligonucleotide
  misc_feature 1..20: note = Target: SCN10A; (+) strand; PAM type: YTN; PAM sequence: CTT
  source 1..20: mol_type = other DNA
ctccttctcagtctctcctt

SEQ ID NO: 75344 - DNA, 20 bp, synthetic construct
  misc_feature 1..20: note = Description of Artificial Sequence: Synthetic oligonucleotide
  misc_feature 1..20: note = Target: SCN10A; (+) strand; PAM type: YTN; PAM sequence: TTC
  source 1..20: mol_type = other DNA
tccttctcagtctctccttt

SEQ ID NO: 75345 - DNA, 20 bp, synthetic construct
  misc_feature 1..20: note = Description of Artificial Sequence: Synthetic oligonucleotide
  misc_feature 1..20: note = Target: SCN10A; (+) strand; PAM type: YTN; PAM sequence: CTC
  source 1..20: mol_type = other DNA
cttctcagtctctcctttct

SEQ ID NO: 75346 - DNA, 20 bp, synthetic construct
  misc_feature 1..20: note = Description of Artificial Sequence: Synthetic oligonucleotide
  misc_feature 1..20: note = Target: SCN10A; (+) strand; PAM type: YTN; PAM sequence: CTT
  source 1..20: mol_type = other DNA
ctcagtctctcctttctcag

SEQ ID NO: 75347 - DNA, 20 bp, synthetic construct
  misc_feature 1..20: note = Description of Artificial Sequence: Synthetic oligonucleotide
  misc_feature 1..20: note = Target: SCN10A; (+) strand; PAM type: YTN; PAM sequence: TTC
  source 1..20: mol_type = other DNA
tcagtctctcctttctcagc

SEQ ID NO: 75348 - DNA, 20 bp, synthetic construct
  misc_feature 1..20: note = Description of Artificial Sequence: Synthetic oligonucleotide
  misc_feature 1..20: note = Target: SCN10A; (+) strand; PAM type: YTN; PAM sequence: CTC
  source 1..20: mol_type = other DNA
agtctctcctttctcagctt

SEQ ID NO: 75349 - DNA, 20 bp, synthetic construct
  misc_feature 1..20: note = Description of Artificial Sequence: Synthetic oligonucleotide
  misc_feature 1..20: note = Target: SCN10A; (+) strand; PAM type: YTN; PAM sequence: CTC
  source 1..20: mol_type = other DNA
tcctttctcagcttttccca

SEQ ID NO: 75350 - DNA, 20 bp, synthetic construct
  misc_feature 1..20: note = Description of Artificial Sequence: Synthetic oligonucleotide
  misc_feature 1..20: note = Target: SCN10A; (+) strand; PAM type: YTN; PAM sequence: CTC
  source 1..20: mol_type = other DNA
ctttctcagcttttcccata

SEQ ID NO: 75351 - DNA, 20 bp, synthetic construct
  misc_feature 1..20: note = Description of Artificial Sequence: Synthetic oligonucleotide
  misc_feature 1..20: note = Target: SCN10A; (+) strand; PAM type: YTN; PAM sequence: CTT
  source 1..20: mol_type = other DNA
tctcagcttttcccatacat

SEQ ID NO: 75352 - DNA, 20 bp, synthetic construct
  misc_feature 1..20: note = Description of Artificial Sequence: Synthetic oligonucleotide
  misc_feature 1..20: note = Target: SCN10A; (+) strand; PAM type: YTN; PAM sequence: TTT
  source 1..20: mol_type = other DNA
ctcagcttttcccatacatg

SEQ ID NO: 75353 - DNA, 20 bp, synthetic construct
  misc_feature 1..20: note = Description of Artificial Sequence: Synthetic oligonucleotide
  misc_feature 1..20: note = Target: SCN10A; (+) strand; PAM type: YTN; PAM sequence: TTC
  source 1..20: mol_type = other DNA
tcagcttttcccatacatga

SEQ ID NO: 75354 - DNA, 20 bp, synthetic construct
  misc_feature 1..20: note = Description of Artificial Sequence: Synthetic oligonucleotide
  misc_feature 1..20: note = Target: SCN10A; (+) strand; PAM type: YTN; PAM sequence: CTC
  source 1..20: mol_type = other DNA
agcttttcccatacatgatt

SEQ ID NO: 75355 - DNA, 20 bp, synthetic construct
  misc_feature 1..20: note = Description of Artificial Sequence: Synthetic oligonucleotide
  misc_feature 1..20: note = Target: SCN10A; (+) strand; PAM type: YTN; PAM sequence: CTT
  source 1..20: mol_type = other DNA
ttcccatacatgattgtgaa

SEQ ID NO: 75356 - DNA, 20 bp, synthetic construct
  misc_feature 1..20: note = Description of Artificial Sequence: Synthetic oligonucleotide
  misc_feature 1..20: note = Target: SCN10A; (+) strand; PAM type: YTN; PAM sequence: TTT
  source 1..20: mol_type = other DNA
tcccatacatgattgtgaat

SEQ ID NO: 75357 - DNA, 20 bp, synthetic construct
  misc_feature 1..20: note = Description of Artificial Sequence: Synthetic oligonucleotide
  misc_feature 1..20: note = Target: SCN10A; (+) strand; PAM type: YTN; PAM sequence: TTT
  source 1..20: mol_type = other DNA
cccatacatgattgtgaata

SEQ ID NO: 75358 - DNA, 20 bp, synthetic construct
  misc_feature 1..20: note = Description of Artificial Sequence: Synthetic oligonucleotide
  misc_feature 1..20: note = Target: SCN10A; (+) strand; PAM type: YTN; PAM sequence: TTC
  source 1..20: mol_type = other DNA
ccatacatgattgtgaataa

SEQ ID NO: 75359 - DNA, 20 bp, synthetic construct
  misc_feature 1..20: note = Description of Artificial Sequence: Synthetic oligonucleotide
  misc_feature 1..20: note = Target: SCN10A; (+) strand; PAM type: YTN; PAM sequence: TTG
  source 1..20: mol_type = other DNA
tgaataatggcactctatct

SEQ ID NO: 75360 - DNA, 20 bp, synthetic construct
  misc_feature 1..20: note = Description of Artificial Sequence: Synthetic oligonucleotide
  misc_feature 1..20: note = Target: SCN10A; (+) strand; PAM type: YTN; PAM sequence: CTC
  source 1..20: mol_type = other DNA
tatcttttgttttcagaata

SEQ ID NO: 75361 - DNA, 20 bp, synthetic construct
  misc_feature 1..20: note = Description of Artificial Sequence: Synthetic oligonucleotide
  misc_feature 1..20: note = Target: SCN10A; (+) strand; PAM type: YTN; PAM sequence: CTA
  source 1..20: mol_type = other DNA
tcttttgttttcagaataat

SEQ ID NO: 75362 - DNA, 20 bp, synthetic construct
  misc_feature 1..20: note = Description of Artificial Sequence: Synthetic oligonucleotide
  misc_feature 1..20: note = Target: SCN10A; (+) strand; PAM type: YTN; PAM sequence: CTT
  source 1..20: mol_type = other DNA
ttgttttcagaataataaca

SEQ ID NO: 75363 - DNA, 20 bp, synthetic construct
  misc_feature 1..20: note = Description of Artificial Sequence: Synthetic oligonucleotide
  misc_feature 1..20: note = Target: SCN10A; (+) strand; PAM type: YTN; PAM sequence: TTT
  source 1..20: mol_type = other DNA
tgttttcagaataataacaa

SEQ ID NO: 75364 - DNA, 20 bp, synthetic construct
  misc_feature 1..20: note = Description of Artificial Sequence: Synthetic oligonucleotide
  misc_feature 1..20: note = Target: SCN10A; (+) strand; PAM type: YTN; PAM sequence: TTT
  source 1..20: mol_type = other DNA
gttttcagaataataacaat

SEQ ID NO: 75365 - DNA, 20 bp, synthetic construct
  misc_feature 1..20: note = Description of Artificial Sequence: Synthetic oligonucleotide
  misc_feature 1..20: note = Target: SCN10A; (+) strand; PAM type: YTN; PAM sequence: TTG
  source 1..20: mol_type = other DNA
ttttcagaataataacaata

SEQ ID NO: 75366 - DNA, 20 bp, synthetic construct
  misc_feature 1..20: note = Description of Artificial Sequence: Synthetic oligonucleotide
  misc_feature 1..20: note = Target: SCN10A; (+) strand; PAM type: YTN; PAM sequence: TTT
  source 1..20: mol_type = other DNA
tcagaataataacaatagta

SEQ ID NO: 75367 - DNA, 20 bp, synthetic construct
  misc_feature 1..20: note = Description of Artificial Sequence: Synthetic oligonucleotide
  misc_feature 1..20: note = Target: SCN10A; (+) strand; PAM type: YTN; PAM sequence: TTT
  source 1..20: mol_type = other DNA
cagaataataacaatagtaa

SEQ ID NO: 75368 - DNA, 20 bp, synthetic construct
  misc_feature 1..20: note = Description of Artificial Sequence: Synthetic oligonucleotide
  misc_feature 1..20: note = Target: SCN10A; (+) strand; PAM type: YTN; PAM sequence: TTC
  source 1..20: mol_type = other DNA
agaataataacaatagtaac

SEQ ID NO: 75369 - DNA, 20 bp, synthetic construct
  misc_feature 1..20: note = Description of Artificial Sequence: Synthetic oligonucleotide
  misc_feature 1..20: note = Target: SCN10A; (+) strand; PAM type: YTN; PAM sequence: CTT
  source 1..20: mol_type = other DNA
caacagcgctagcatttact

SEQ ID NO: 75370 - DNA, 20 bp, synthetic construct
  misc_feature 1..20: note = Description of Artificial Sequence: Synthetic oligonucleotide
  misc_feature 1..20: note = Target: SCN10A; (+) strand; PAM type: YTN; PAM sequence: TTC
  source 1..20: mol_type = other DNA
aacagcgctagcatttactg

SEQ ID NO: 75371 - DNA, 20 bp, synthetic construct
  misc_feature 1..20: note = Description of Artificial Sequence: Synthetic oligonucleotide
  misc_feature 1..20: note = Target: SCN10A; (+) strand; PAM type: YTN; PAM sequence: CTA
  source 1..20: mol_type = other DNA
gcatttactgagattccact

SEQ ID NO: 75372 - DNA, 20 bp, synthetic construct
  misc_feature 1..20: note = Description of Artificial Sequence: Synthetic oligonucleotide
  misc_feature 1..20: note = Target: SCN10A; (+) strand; PAM type: YTN; PAM sequence: TTT
  source 1..20: mol_type = other DNA
actgagattccactgtattt

SEQ ID NO: 75373 - DNA, 20 bp, synthetic construct
  misc_feature 1..20: note = Description of Artificial Sequence: Synthetic oligonucleotide
  misc_feature 1..20: note = Target: SCN10A; (+) strand; PAM type: YTN; PAM sequence: TTA
  source 1..20: mol_type = other DNA
ctgagattccactgtatttc

SEQ ID NO: 75374 - DNA, 20 bp, synthetic construct
  misc_feature 1..20: note = Description of Artificial Sequence: Synthetic oligonucleotide
  misc_feature 1..20: note = Target: SCN10A; (+) strand; PAM type: YTN; PAM sequence: CTG
  source 1..20: mol_type = other DNA
agattccactgtatttcaga

SEQ ID NO: 75375 - DNA, 20 bp, synthetic construct
  misc_feature 1..20: note = Description of Artificial Sequence: Synthetic oligonucleotide
  misc_feature 1..20: note = Target: SCN10A; (+) strand; PAM type: YTN; PAM sequence: TTC
  source 1..20: mol_type = other DNA
cactgtatttcagactctgg

SEQ ID NO: 75376 - DNA, 20 bp, synthetic construct
  misc_feature 1..20: note = Description of Artificial Sequence: Synthetic oligonucleotide
  misc_feature 1..20: note = Target: SCN10A; (+) strand; PAM type: YTN; PAM sequence: CTG
  source 1..20: mol_type = other DNA
tatttcagactctggattaa

SEQ ID NO: 75377 - DNA, 20 bp, synthetic construct
  misc_feature 1..20: note = Description of Artificial Sequence: Synthetic oligonucleotide
  misc_feature 1..20: note = Target: SCN10A; (+) strand; PAM type: YTN; PAM sequence: TTT
  source 1..20: mol_type = other DNA
cagactctggattaagcaat

SEQ ID NO: 75378 - DNA, 20 bp, synthetic construct
  misc_feature 1..20: note = Description of Artificial Sequence: Synthetic oligonucleotide
  misc_feature 1..20: note = Target: SCN10A; (+) strand; PAM type: YTN; PAM sequence: TTC
  source 1..20: mol_type = other DNA
agactctggattaagcaatt

SEQ ID NO: 75379 - DNA, 20 bp, synthetic construct
  misc_feature 1..20: note = Description of Artificial Sequence: Synthetic oligonucleotide
  misc_feature 1..20: note = Target: SCN10A; (+) strand; PAM type: YTN; PAM sequence: CTC
  source 1..20: mol_type = other DNA
tggattaagcaattttcatg

SEQ ID NO: 75380 - DNA, 20 bp, synthetic construct
  misc_feature 1..20: note = Description of Artificial Sequence: Synthetic oligonucleotide
  misc_feature 1..20: note = Target: SCN10A; (+) strand; PAM type: YTN; PAM sequence: CTG
  source 1..20: mol_type = other DNA
gattaagcaattttcatgca

SEQ ID NO: 75381 - DNA, 20 bp, synthetic construct
  misc_feature 1..20: note = Description of Artificial Sequence: Synthetic oligonucleotide
  misc_feature 1..20: note = Target: SCN10A; (+) strand; PAM type: YTN; PAM sequence: TTA
  source 1..20: mol_type = other DNA
agcaattttcatgcattatt

SEQ ID NO: 75382 - DNA, 20 bp, synthetic construct
  misc_feature 1..20: note = Description of Artificial Sequence: Synthetic oligonucleotide
  misc_feature 1..20: note = Target: SCN10A; (+) strand; PAM type: YTN; PAM sequence: TTT
  source 1..20: mol_type = other DNA
tcatgcattattacattaac

SEQ ID NO: 75383 - DNA, 20 bp, synthetic construct
  misc_feature 1..20: note = Description of Artificial Sequence: Synthetic oligonucleotide
  misc_feature 1..20: note = Target: SCN10A; (+) strand; PAM type: YTN; PAM sequence: TTT
  source 1..20: mol_type = other DNA
catgcattattacattaact

SEQ ID NO: 75384 - DNA, 20 bp, synthetic construct
  misc_feature 1..20: note = Description of Artificial Sequence: Synthetic oligonucleotide
  misc_feature 1..20: note = Target: SCN10A; (+) strand; PAM type: YTN; PAM sequence: TTC
  source 1..20: mol_type = other DNA
atgcattattacattaacta

SEQ ID NO: 75385 - DNA, 20 bp, synthetic construct
  misc_feature 1..20: note = Description of Artificial Sequence: Synthetic oligonucleotide
  misc_feature 1..20: note = Target: SCN10A; (+) strand; PAM type: YTN; PAM sequence: TTA
  source 1..20: mol_type = other DNA
ttacattaactatcactgta

SEQ ID NO: 75386 - DNA, 20 bp, synthetic construct
  misc_feature 1..20: note = Description of Artificial Sequence: Synthetic oligonucleotide
  misc_feature 1..20: note = Target: SCN10A; (+) strand; PAM type: YTN; PAM sequence: TTA
  source 1..20: mol_type = other DNA
cattaactatcactgtacct

SEQ ID NO: 75387 - DNA, 20 bp, synthetic construct
  misc_feature 1..20: note = Description of Artificial Sequence: Synthetic oligonucleotide
  misc_feature 1..20: note = Target: SCN10A; (+) strand; PAM type: YTN; PAM sequence: TTA
  source 1..20: mol_type = other DNA
actatcactgtacctgtgaa

SEQ ID NO: 75388 - DNA, 20 bp, synthetic construct
  misc_feature 1..20: note = Description of Artificial Sequence: Synthetic oligonucleotide
  misc_feature 1..20: note = Target: SCN10A; (+) strand; PAM type: YTN; PAM sequence: CTA
  source 1..20: mol_type = other DNA
tcactgtacctgtgaagtat

SEQ ID NO: 75389 - DNA, 20 bp, synthetic construct
  misc_feature 1..20: note = Description of Artificial Sequence: Synthetic oligonucleotide
  misc_feature 1..20: note = Target: SCN10A; (+) strand; PAM type: YTN; PAM sequence: CTG
  source 1..20: mol_type = other DNA
tacctgtgaagtattatctc

SEQ ID NO: 75390 - DNA, 20 bp, synthetic construct
  misc_feature 1..20: note = Description of Artificial Sequence: Synthetic oligonucleotide
  misc_feature 1..20: note = Target: SCN10A; (+) strand; PAM type: YTN; PAM sequence: CTG
  source 1..20: mol_type = other DNA
tgaagtattatctctaatat

SEQ ID NO: 75391 - DNA, 20 bp, synthetic construct
  misc_feature 1..20: note = Description of Artificial Sequence: Synthetic oligonucleotide
  misc_feature 1..20: note = Target: SCN10A; (+) strand; PAM type: YTN; PAM sequence: TTA
  source 1..20: mol_type = other DNA
tctctaatatataaataaga

SEQ ID NO: 75392 - DNA, 20 bp, synthetic construct
  misc_feature 1..20: note = Description of Artificial Sequence: Synthetic oligonucleotide
  misc_feature 1..20: note = Target: SCN10A; (+) strand; PAM type: YTN; PAM sequence: CTC
  source 1..20: mol_type = other DNA
taatatataaataagatacc

SEQ ID NO: 75393 - DNA, 20 bp, synthetic construct
  misc_feature 1..20: note = Description of Artificial Sequence: Synthetic oligonucleotide
  misc_feature 1..20: note = Target: SCN10A; (+) strand; PAM type: YTN; PAM sequence: CTA
  source 1..20: mol_type = other DNA
atatataaataagataccag

SEQ ID NO: 75394 - DNA, 20 bp, synthetic construct
  misc_feature 1..20: note = Description of Artificial Sequence: Synthetic oligonucleotide
  misc_feature 1..20: note = Target: SCN10A; (+) strand; PAM type: YTN; PAM sequence: TTA
  source 1..20: mol_type = other DNA
aaatttccaagatcacatta

SEQ ID NO: 75395 - DNA, 20 bp, synthetic construct
  misc_feature 1..20: note = Description of Artificial Sequence: Synthetic oligonucleotide
  misc_feature 1..20: note = Target: SCN10A; (+) strand; PAM type: YTN; PAM sequence: TTT
  source 1..20: mol_type = other DNA
ccaagatcacattactaatg

SEQ ID NO: 75396 - DNA, 20 bp, synthetic construct
  misc_feature 1..20: note = Description of Artificial Sequence: Synthetic oligonucleotide
  misc_feature 1..20: note = Target: SCN10A; (+) strand; PAM type: YTN; PAM sequence: TTC
  source 1..20: mol_type = other DNA
caagatcacattactaatga

SEQ ID NO: 75397 - DNA, 20 bp, synthetic construct
  misc_feature 1..20: note = Description of Artificial Sequence: Synthetic oligonucleotide
  misc_feature 1..20: note = Target: SCN10A; (+) strand; PAM type: YTN; PAM sequence: TTA
  source 1..20: mol_type = other DNA
ctaatgagtggcagaacggt

SEQ ID NO: 75398 - DNA, 20 bp, synthetic construct
  misc_feature 1..20: note = Description of Artificial Sequence: Synthetic oligonucleotide
  misc_feature 1..20: note = Target: SCN10A; (+) strand; PAM type: YTN; PAM sequence: CTA
  source 1..20: mol_type = other DNA
atgagtggcagaacggtact

SEQ ID NO: 75399 - DNA, 20 bp, synthetic construct
  misc_feature 1..20: note = Description of Artificial Sequence: Synthetic oligonucleotide
  misc_feature 1..20: note = Target: SCN10A; (+) strand; PAM type: YTN; PAM sequence: CTT
  source 1..20: mol_type = other DNA
aaactcaggtatgtttgcca

SEQ ID NO: 75400 - DNA, 20 bp, synthetic construct
  misc_feature 1..20: note = Description of Artificial Sequence: Synthetic oligonucleotide
  misc_feature 1..20: note = Target: SCN10A; (+) strand; PAM type: YTN; PAM sequence: TTA
  source 1..20: mol_type = other DNA
aactcaggtatgtttgccac

SEQ ID NO: 75401 - DNA, 20 bp, synthetic construct
  misc_feature 1..20: note = Description of Artificial Sequence: Synthetic oligonucleotide
  misc_feature 1..20: note = Target: SCN10A; (+) strand; PAM type: YTN; PAM sequence: CTC
  source 1..20: mol_type = other DNA
aggtatgtttgccacaatct

SEQ ID NO: 75402 - DNA, 20 bp, synthetic construct
  misc_feature 1..20: note = Description of Artificial Sequence: Synthetic oligonucleotide
  misc_feature 1..20: note = Target: SCN10A; (+) strand; PAM type: YTN; PAM sequence: TTT
  source 1..20: mol_type = other DNA
gccacaatctcttggaaaca

SEQ ID NO: 75403 - DNA, 20 bp, synthetic construct
  misc_feature 1..20: note = Description of Artificial Sequence: Synthetic oligonucleotide
  misc_feature 1..20: note = Target: SCN10A; (+) strand; PAM type: YTN; PAM sequence: TTG
  source 1..20: mol_type = other DNA
ccacaatctcttggaaacat

SEQ ID NO: 75404 - DNA, 20 bp, synthetic construct
  misc_feature 1..20: note = Description of Artificial Sequence: Synthetic oligonucleotide
  misc_feature 1..20: note = Target: SCN10A; (+) strand; PAM type: YTN; PAM sequence: CTC
  source 1..20: mol_type = other DNA
ttggaaacatctcatcattc

SEQ ID NO: 75405 - DNA, 20 bp, synthetic construct
  misc_feature 1..20: note = Description of Artificial Sequence: Synthetic oligonucleotide
  misc_feature 1..20: note = Target: SCN10A; (+) strand; PAM type: YTN; PAM sequence: CTT
  source 1..20: mol_type = other DNA
ggaaacatctcatcattccc

SEQ ID NO: 75406 - DNA, 20 bp, synthetic construct
  misc_feature 1..20: note = Description of Artificial Sequence: Synthetic oligonucleotide
  misc_feature 1..20: note = Target: SCN10A; (+) strand; PAM type: YTN; PAM sequence: TTG
  source 1..20: mol_type = other DNA
gaaacatctcatcattccca

SEQ ID NO: 75407 - DNA, 20 bp, synthetic construct
  misc_feature 1..20: note = Description of Artificial Sequence: Synthetic oligonucleotide
  misc_feature 1..20: note = Target: SCN10A; (+) strand; PAM type: YTN; PAM sequence: CTC
  source 1..20: mol_type = other DNA
atcattcccatatcttcact

SEQ ID NO: 75408 - DNA, 20 bp, synthetic construct
  misc_feature 1..20: note = Description of Artificial Sequence: Synthetic oligonucleotide
  misc_feature 1..20: note = Target: SCN10A; (+) strand; PAM type: YTN; PAM sequence: TTC
  source 1..20: mol_type = other DNA
ccatatcttcacttctcatt

SEQ ID NO: 75409 - DNA, 20 bp, synthetic construct
  misc_feature 1..20: note = Description of Artificial Sequence: Synthetic oligonucleotide
  misc_feature 1..20: note = Target: SCN10A; (+) strand; PAM type: YTN; PAM sequence: CTT
  source 1..20: mol_type = other DNA
cacttctcatttatatgcag

SEQ ID NO: 75410 - DNA, 20 bp, synthetic construct
  misc_feature 1..20: note = Description of Artificial Sequence: Synthetic oligonucleotide
  misc_feature 1..20: note = Target: SCN10A; (+) strand; PAM type: YTN; PAM sequence: TTC
  source 1..20: mol_type = other DNA
acttctcatttatatgcaga

SEQ ID NO: 75411 - DNA, 20 bp, synthetic construct
  misc_feature 1..20: note = Description of Artificial Sequence: Synthetic oligonucleotide
  misc_feature 1..20: note = Target: SCN10A; (+) strand; PAM type: YTN; PAM sequence: CTT
  source 1..20: mol_type = other DNA
ctcatttatatgcagatgac

SEQ ID NO: 75412 - DNA, 20 bp, synthetic construct
  misc_feature 1..20: note = Description of Artificial Sequence: Synthetic oligonucleotide
  misc_feature 1..20: note = Target: SCN10A; (+) strand; PAM type: YTN; PAM sequence: TTC
  source 1..20: mol_type = other DNA
tcatttatatgcagatgact

SEQ ID NO: 75413 - DNA, 20 bp, synthetic construct
  misc_feature 1..20: note = Description of Artificial Sequence: Synthetic oligonucleotide
  misc_feature 1..20: note = Target: SCN10A; (+) strand; PAM type: YTN; PAM sequence: CTC
  source 1..20: mol_type = other DNA
atttatatgcagatgactga

SEQ ID NO: 75414 - DNA, 20 bp, synthetic construct
  misc_feature 1..20: note = Description of Artificial Sequence: Synthetic oligonucleotide
  misc_feature 1..20: note = Target: SCN10A; (+) strand; PAM type: YTN; PAM sequence: TTT
  source 1..20: mol_type = other DNA
atatgcagatgactgagtct

SEQ ID NO: 75415 - DNA, 20 bp, synthetic construct
  misc_feature 1..20: note = Description of Artificial Sequence: Synthetic oligonucleotide
  misc_feature 1..20: note = Target: SCN10A; (+) strand; PAM type: YTN; PAM sequence: TTA
  source 1..20: mol_type = other DNA
tatgcagatgactgagtctt

SEQ ID NO: 75416 - DNA, 20 bp, synthetic construct
  misc_feature 1..20: note = Description of Artificial Sequence: Synthetic oligonucleotide
  misc_feature 1..20: note = Target: SCN10A; (+) strand; PAM type: YTN; PAM sequence: CTG
  source 1..20: mol_type = other DNA
agtctttatctgtagctctc

SEQ ID NO: 75417 - DNA, 20 bp, synthetic construct
  misc_feature 1..20: note = Description of Artificial Sequence: Synthetic oligonucleotide
  misc_feature 1..20: note = Target: SCN10A; (+) strand; PAM type: YTN; PAM sequence: CTT
  source 1..20: mol_type = other DNA
tatctgtagctctcagaagt

SEQ ID NO: 75418 - DNA, 20 bp, synthetic construct
  misc_feature 1..20: note = Description of Artificial Sequence: Synthetic oligonucleotide
  misc_feature 1..20: note = Target: SCN10A; (+) strand; PAM type: YTN; PAM sequence: TTT
  source 1..20: mol_type = other DNA
atctgtagctctcagaagtc

SEQ ID NO: 75419 - DNA, 20 bp, synthetic construct
  misc_feature 1..20: note = Description of Artificial Sequence: Synthetic oligonucleotide
  misc_feature 1..20: note = Target: SCN10A; (+) strand; PAM type: YTN; PAM sequence: TTA
  source 1..20: mol_type = other DNA
tctgtagctctcagaagtcc

SEQ ID NO: 75420 - DNA, 20 bp, synthetic construct
  misc_feature 1..20: note = Description of Artificial Sequence: Synthetic oligonucleotide
  misc_feature 1..20: note = Target: SCN10A; (+) strand; PAM type: YTN; PAM sequence: CTG
  source 1..20: mol_type = other DNA
tagctctcagaagtccatgg

SEQ ID NO: 75421 - DNA, 20 bp, synthetic construct
  misc_feature 1..20: note = Description of Artificial Sequence: Synthetic oligonucleotide
  misc_feature 1..20: note = Target: SCN10A; (+) strand; PAM type: YTN; PAM sequence: CTC
  source 1..20: mol_type = other DNA
tcagaagtccatggggctca

SEQ ID NO: 75422 - DNA, 20 bp, synthetic construct
  misc_feature 1..20: note = Description of Artificial Sequence: Synthetic oligonucleotide
  misc_feature 1..20: note = Target: SCN10A; (+) strand; PAM type: YTN; PAM sequence: CTC
  source 1..20: mol_type = other DNA
agaagtccatggggctcaga

SEQ ID NO: 75423 - DNA, 20 bp, synthetic construct
  misc_feature 1..20: note = Description of Artificial Sequence: Synthetic oligonucleotide
  misc_feature 1..20: note = Target: SCN10A; (+) strand; PAM type: YTN; PAM sequence: CTC
  source 1..20: mol_type = other DNA
agatcttcatttgatctctc

SEQ ID NO: 75424 - DNA, 20 bp, synthetic construct
  misc_feature 1..20: note = Description of Artificial Sequence: Synthetic oligonucleotide
  misc_feature 1..20: note = Target: SCN10A; (+) strand; PAM type: YTN; PAM sequence: CTT
  source 1..20: mol_type = other DNA
catttgatctctccacttca

SEQ ID NO: 75425 - DNA, 20 bp, synthetic construct
  misc_feature 1..20: note = Description of Artificial Sequence: Synthetic oligonucleotide
  misc_feature 1..20: note = Target: SCN10A; (+) strand; PAM type: YTN; PAM sequence: TTC
  source 1..20: mol_type = other DNA
atttgatctctccacttcag

SEQ ID NO: 75426 - DNA, 20 bp, synthetic construct
  misc_feature 1..20: note = Description of Artificial Sequence: Synthetic oligonucleotide
  misc_feature 1..20: note = Target: SCN10A; (+) strand; PAM type: YTN; PAM sequence: TTT
  source 1..20: mol_type = other DNA
gatctctccacttcagtgtc

SEQ ID NO: 75427 - DNA, 20 bp, synthetic construct
  misc_feature 1..20: note = Description of Artificial Sequence: Synthetic oligonucleotide
  misc_feature 1..20: note = Target: SCN10A; (+) strand; PAM type: YTN; PAM sequence: TTG
  source 1..20: mol_type = other DNA
atctctccacttcagtgtct

SEQ ID NO: 75428 - DNA, 20 bp, synthetic construct
  misc_feature 1..20: note = Description of Artificial Sequence: Synthetic oligonucleotide
  misc_feature 1..20: note = Target: SCN10A; (+) strand; PAM type: YTN; PAM sequence: CTC
  source 1..20: mol_type = other DNA
tccacttcagtgtctcatga

SEQ ID NO: 75429 - DNA, 20 bp, synthetic construct
  misc_feature 1..20: note = Description of Artificial Sequence: Synthetic oligonucleotide
  misc_feature 1..20: note = Target: SCN10A; (+) strand; PAM type: YTN; PAM sequence: CTC
  source 1..20: mol_type = other DNA
cacttcagtgtctcatgagc

SEQ ID NO: 75430 - DNA, 20 bp, synthetic construct
  misc_feature 1..20: note = Description of Artificial Sequence: Synthetic oligonucleotide
  misc_feature 1..20: note = Target: SCN10A; (+) strand; PAM type: YTN; PAM sequence: CTT
  source 1..20: mol_type = other DNA
cagtgtctcatgagcacctc

SEQ ID NO: 75431 - DNA, 20 bp, synthetic construct
  misc_feature 1..20: note = Description of Artificial Sequence: Synthetic oligonucleotide
  misc_feature 1..20: note = Target: SCN10A; (+) strand; PAM type: YTN; PAM sequence: TTC
  source 1..20: mol_type = other DNA
agtgtctcatgagcacctca

SEQ ID NO: 75432 - DNA, 20 bp, synthetic construct
  misc_feature 1..20: note = Description of Artificial Sequence: Synthetic oligonucleotide
  misc_feature 1..20: note = Target: SCN10A; (+) strand; PAM type: YTN; PAM sequence: CTC
  source 1..20: mol_type = other DNA
atgagcacctcaagctcagc

SEQ ID NO: 75433 - DNA, 20 bp, synthetic construct
  misc_feature 1..20: note = Description of Artificial Sequence: Synthetic oligonucleotide
  misc_feature 1..20: note = Target: SCN10A; (+) strand; PAM type: YTN; PAM sequence: CTC
  source 1..20: mol_type = other DNA
aagctcagcatgccccaaac

SEQ ID NO: 75434 - DNA, 20 bp, synthetic construct
  misc_feature 1..20: note = Description of Artificial Sequence: Synthetic oligonucleotide
  misc_feature 1..20: note = Target: SCN10A; (+) strand; PAM type: YTN; PAM sequence: CTC
  source 1..20: mol_type = other DNA
agcatgccccaaactaaact

SEQ ID NO: 75435 - DNA, 20 bp, synthetic construct
  misc_feature 1..20: note = Description of Artificial Sequence: Synthetic oligonucleotide
  misc_feature 1..20: note = Target: SCN10A; (+) strand; PAM type: YTN; PAM sequence: CTA
  source 1..20: mol_type = other DNA
aactcataattatctcctca

SEQ ID NO: 75436 - DNA, 20 bp, synthetic construct
  misc_feature 1..20: note = Description of Artificial Sequence: Synthetic oligonucleotide
  misc_feature 1..20: note = Target: SCN10A; (+) strand; PAM type: YTN; PAM sequence: CTC
  source 1..20: mol_type = other DNA
ataattatctcctcacttct

SEQ ID NO: 75437 - DNA, 20 bp, synthetic construct
  misc_feature 1..20: note = Description of Artificial Sequence: Synthetic oligonucleotide
  misc_feature 1..20: note = Target: SCN10A; (+) strand; PAM type: YTN; PAM sequence: TTA
  source 1..20: mol_type = other DNA
tctcctcacttctttctaat

SEQ ID NO: 75438 - DNA, 20 bp, synthetic construct
  misc_feature 1..20: note = Description of Artificial Sequence: Synthetic oligonucleotide
  misc_feature 1..20: note = Target: SCN10A; (+) strand; PAM type: YTN; PAM sequence: CTC
  source 1..20: mol_type = other DNA
ctcacttctttctaatacct

SEQ ID NO: 75439 - DNA, 20 bp, synthetic construct
  misc_feature 1..20: note = Description of Artificial Sequence: Synthetic oligonucleotide
  misc_feature 1..20: note = Target: SCN10A; (+) strand; PAM type: YTN; PAM sequence: CTC
  source 1..20: mol_type = other DNA
acttctttctaatacctgcc

SEQ ID NO: 75440 - DNA, 20 bp, synthetic construct
  misc_feature 1..20: note = Description of Artificial Sequence: Synthetic oligonucleotide
  misc_feature 1..20: note = Target: SCN10A; (+) strand; PAM type: YTN; PAM sequence: CTT
  source 1..20: mol_type = other DNA
ctttctaatacctgcctctc

SEQ ID NO: 75441 - DNA, 20 bp, synthetic construct
  misc_feature 1..20: note = Description of Artificial Sequence: Synthetic oligonucleotide
  misc_feature 1..20: note = Target: SCN10A; (+) strand; PAM type: YTN; PAM sequence: TTC
  source 1..20: mol_type = other DNA
tttctaatacctgcctctct

SEQ ID NO: 75442 - DNA, 20 bp, synthetic construct
  misc_feature 1..20: note = Description of Artificial Sequence: Synthetic oligonucleotide
  misc_feature 1..20: note = Target: SCN10A; (+) strand; PAM type: YTN; PAM sequence: CTT
  source 1..20: mol_type = other DNA
tctaatacctgcctctcttc

SEQ ID NO: 75443 - DNA, 20 bp, synthetic construct
  misc_feature 1..20: note = Description of Artificial Sequence: Synthetic oligonucleotide
  misc_feature 1..20: note = Target: SCN10A; (+) strand; PAM type: YTN; PAM sequence: TTT
  source 1..20: mol_type = other DNA
ctaatacctgcctctcttct

SEQ ID NO: 75444 - DNA, 20 bp, synthetic construct
  misc_feature 1..20: note = Description of Artificial Sequence: Synthetic oligonucleotide
  misc_feature 1..20: note = Target: SCN10A; (+) strand; PAM type: YTN; PAM sequence: TTC
  source 1..20: mol_type = other DNA
taatacctgcctctcttcta

SEQ ID NO: 75445 - DNA, 20 bp, synthetic construct
  misc_feature 1..20: note = Description of Artificial Sequence: Synthetic oligonucleotide
  misc_feature 1..20: note = Target: SCN10A; (+) strand; PAM type: YTN; PAM sequence: CTA
  source 1..20: mol_type = other DNA
atacctgcctctcttctatg

SEQ ID NO: 75446 - DNA, 20 bp, synthetic construct
  misc_feature 1..20: note = Description of Artificial Sequence: Synthetic oligonucleotide
  misc_feature 1..20: note = Target: SCN10A; (+) strand; PAM type: YTN; PAM sequence: CTG
  source 1..20: mol_type = other DNA
cctctcttctatgtcttttt

SEQ ID NO: 75447 - DNA, 20 bp, synthetic construct
  misc_feature 1..20: note = Description of Artificial Sequence: Synthetic oligonucleotide
  misc_feature 1..20: note = Target: SCN10A; (+) strand; PAM type: YTN; PAM sequence: CTC
  source 1..20: mol_type = other DNA
tcttctatgtctttttactg

SEQ ID NO: 75448 - DNA, 20 bp, synthetic construct
  misc_feature 1..20: note = Description of Artificial Sequence: Synthetic oligonucleotide
  misc_feature 1..20: note = Target: SCN10A; (+) strand; PAM type: YTN; PAM sequence: CTC
  source 1..20: mol_type = other DNA
ttctatgtctttttactgcc

SEQ ID NO: 75449 - DNA, 20 bp, synthetic construct
  misc_feature 1..20: note = Description of Artificial Sequence: Synthetic oligonucleotide
  misc_feature 1..20: note = Target: SCN10A; (+) strand; PAM type: YTN; PAM sequence: CTT
  source 1..20: mol_type = other DNA
ctatgtctttttactgccat

SEQ ID NO: 75450 - DNA, 20 bp, synthetic construct
  misc_feature 1..20: note = Description of Artificial Sequence: Synthetic oligonucleotide
  misc_feature 1..20: note = Target: SCN10A; (+) strand; PAM type: YTN; PAM sequence: TTC
  source 1..20: mol_type = other DNA
tatgtctttttactgccatt

SEQ ID NO: 75451 - DNA, 20 bp, synthetic construct
  misc_feature 1..20: note = Description of Artificial Sequence: Synthetic oligonucleotide
  misc_feature 1..20: note = Target: SCN10A; (+) strand; PAM type: YTN; PAM sequence: CTA
  source 1..20: mol_type = other DNA
tgtctttttactgccattag

SEQ ID NO: 75452 - DNA, 20 bp, synthetic construct
  misc_feature 1..20: note = Description of Artificial Sequence: Synthetic oligonucleotide
  misc_feature 1..20: note = Target: SCN10A; (+) strand; PAM type: YTN; PAM sequence: CTT
  source 1..20: mol_type = other DNA
tttactgccattagccccaa

SEQ ID NO: 75453 - DNA, 20 bp, synthetic construct
  misc_feature 1..20: note = Description of Artificial Sequence: Synthetic oligonucleotide
  misc_feature 1..20: note = Target: SCN10A; (+) strand; PAM type: YTN; PAM sequence: TTT
  source 1..20: mol_type = other DNA
ttactgccattagccccaaa

SEQ ID NO: 75454 - DNA, 20 bp, synthetic construct
  misc_feature 1..20: note = Description of Artificial Sequence: Synthetic oligonucleotide
  misc_feature 1..20: note = Target: SCN10A; (+) strand; PAM type: YTN; PAM sequence: TTT
  source 1..20: mol_type = other DNA
tactgccattagccccaaat

SEQ ID NO: 75455 - DNA, 20 bp, synthetic construct
  misc_feature 1..20: note = Description of Artificial Sequence: Synthetic oligonucleotide
  misc_feature 1..20: note = Target: SCN10A; (+) strand; PAM type: YTN; PAM sequence: TTT
  source 1..20: mol_type = other DNA
actgccattagccccaaata

SEQ ID NO: 75456 - DNA, 20 bp, synthetic construct
  misc_feature 1..20: note = Description of Artificial Sequence: Synthetic oligonucleotide
  misc_feature 1..20: note = Target: SCN10A; (+) strand; PAM type: YTN; PAM sequence: TTA
  source 1..20: mol_type = other DNA
ctgccattagccccaaatag

SEQ ID NO: 75457 - DNA, 20 bp, synthetic construct
  misc_feature 1..20: note = Description of Artificial Sequence: Synthetic oligonucleotide
  misc_feature 1..20: note = Target: SCN10A; (+) strand; PAM type: YTN; PAM sequence: CTG
  source 1..20: mol_type = other DNA
ccattagccccaaatagcct

SEQ ID NO: 75458 - DNA, 20 bp, synthetic construct
  misc_feature 1..20: note = Description of Artificial Sequence: Synthetic oligonucleotide
  misc_feature 1..20: note = Target: SCN10A; (+) strand; PAM type: YTN; PAM sequence: TTA
  source 1..20: mol_type = other DNA
gccccaaatagcctgtttct

SEQ ID NO: 75459 - DNA, 20 bp, synthetic construct
  misc_feature 1..20: note = Description of Artificial Sequence: Synthetic oligonucleotide
  misc_feature 1..20: note = Target: SCN10A; (+) strand; PAM type: YTN; PAM sequence: CTG
  source 1..20: mol_type = other DNA
tttctgtgtctgtccacaac

SEQ ID NO: 75460 - DNA, 20 bp, synthetic construct
  misc_feature 1..20: note = Description of Artificial Sequence: Synthetic oligonucleotide
  misc_feature 1..20: note = Target: SCN10A; (+) strand; PAM type: YTN; PAM sequence: TTT
  source 1..20: mol_type = other DNA
ctgtgtctgtccacaacctg

SEQ ID NO: 75461 - DNA, 20 bp, synthetic construct
  misc_feature 1..20: note = Description of Artificial Sequence: Synthetic oligonucleotide
  misc_feature 1..20: note = Target: SCN10A; (+) strand; PAM type: YTN; PAM sequence: TTC
  source 1..20: mol_type = other DNA
tgtgtctgtccacaacctgg

SEQ ID NO: 75462 - DNA, 20 bp, synthetic construct
  misc_feature 1..20: note = Description of Artificial Sequence: Synthetic oligonucleotide
  misc_feature 1..20: note = Target: SCN10A; (+) strand; PAM type: YTN; PAM sequence: CTG
  source 1..20: mol_type = other DNA
tgtctgtccacaacctgggt

SEQ ID NO: 75463 - DNA, 20 bp, synthetic construct
  misc_feature 1..20: note = Description of Artificial Sequence: Synthetic oligonucleotide
  misc_feature 1..20: note = Target: SCN10A; (+) strand; PAM type: YTN; PAM sequence: CTG
  source 1..20: mol_type = other DNA
tccacaacctgggtaccata

SEQ ID NO: 75464 - DNA, 20 bp, synthetic construct
  misc_feature 1..20: note = Description of Artificial Sequence: Synthetic oligonucleotide
  misc_feature 1..20: note = Target: SCN10A; (+) strand; PAM type: YTN; PAM sequence: CTG
  source 1..20: mol_type = other DNA
ggtaccataattatgctctt

SEQ ID NO: 75465 - DNA, 20 bp, synthetic construct
  misc_feature 1..20: note = Description of Artificial Sequence: Synthetic oligonucleotide
  misc_feature 1..20: note = Target: SCN10A; (+) strand; PAM type: YTN; PAM sequence: TTA
  source 1..20: mol_type = other DNA
tgctctttctatttcattcc

SEQ ID NO: 75466 - DNA, 20 bp, synthetic construct
  misc_feature 1..20: note = Description of Artificial Sequence: Synthetic oligonucleotide
  misc_feature 1..20: note = Target: SCN10A; (+) strand; PAM type: YTN; PAM sequence: CTC
  source 1..20: mol_type = other DNA
tttctatttcattccacata

SEQ ID NO: 75467 - DNA, 20 bp, synthetic construct
  misc_feature 1..20: note = Description of Artificial Sequence: Synthetic oligonucleotide
  misc_feature 1..20: note = Target: SCN10A; (+) strand; PAM type: YTN; PAM sequence: CTT
  source 1..20: mol_type = other DNA
tctatttcattccacataca

SEQ ID NO: 75468 - DNA, 20 bp, synthetic construct
  misc_feature 1..20: note = Description of Artificial Sequence: Synthetic oligonucleotide
  misc_feature 1..20: note = Target: SCN10A; (+) strand; PAM type: YTN; PAM sequence: TTT
  source 1..20: mol_type = other DNA
ctatttcattccacatacaa

SEQ ID NO: 75469 - DNA, 20 bp, synthetic construct
  misc_feature 1..20: note = Description of Artificial Sequence: Synthetic oligonucleotide
  misc_feature 1..20: note = Target: SCN10A; (+) strand; PAM type: YTN; PAM sequence: TTC
  source 1..20: mol_type = other DNA
tatttcattccacatacaat

SEQ ID NO: 75470 - DNA, 20 bp, synthetic construct
  misc_feature 1..20: note = Description of Artificial Sequence: Synthetic oligonucleotide
  misc_feature 1..20: note = Target: SCN10A; (+) strand; PAM type: YTN; PAM sequence: CTA
  source 1..20: mol_type = other DNA
tttcattccacatacaatca

SEQ ID NO: 75471 - DNA, 20 bp, synthetic construct
  misc_feature 1..20: note = Description of Artificial Sequence: Synthetic oligonucleotide
  misc_feature 1..20: note = Target: SCN10A; (+) strand; PAM type: YTN; PAM sequence: TTT
  source 1..20: mol_type = other DNA
cattccacatacaatcaaac

SEQ ID NO: 75472 - DNA, 20 bp, synthetic construct
  misc_feature 1..20: note = Description of Artificial Sequence: Synthetic oligonucleotide
  misc_feature 1..20: note = Target: SCN10A; (+) strand; PAM type: YTN; PAM sequence: TTC
  source 1..20: mol_type = other DNA
attccacatacaatcaaaca

SEQ ID NO: 75473 - DNA, 20 bp, synthetic construct
  misc_feature 1..20: note = Description of Artificial Sequence: Synthetic oligonucleotide
  misc_feature 1..20: note = Target: SCN10A; (+) strand; PAM type: YTN; PAM sequence: TTC
  source 1..20: mol_type = other DNA
cacatacaatcaaacatcta

SEQ ID NO: 75474 - DNA, 20 bp, synthetic construct
  misc_feature 1..20: note = Description of Artificial Sequence: Synthetic oligonucleotide
  misc_feature 1..20: note = Target: SCN10A; (+) strand; PAM type: YTN; PAM sequence: CTA
  source 1..20: mol_type = other DNA
gtgctgttgcttctgcctcc

SEQ ID NO: 75475 - DNA, 20 bp, synthetic construct
  misc_feature 1..20: note = Description of Artificial Sequence: Synthetic oligonucleotide
  misc_feature 1..20: note = Target: SCN10A; (+) strand; PAM type: YTN; PAM sequence: CTG
  source 1..20: mol_type = other DNA
ttgcttctgcctccttaata

SEQ ID NO: 75476 - DNA, 20 bp, synthetic construct
  misc_feature 1..20: note = Description of Artificial Sequence: Synthetic oligonucleotide
  misc_feature 1..20: note = Target: SCN10A; (+) strand; PAM type: YTN; PAM sequence: TTG
  source 1..20: mol_type = other DNA
cttctgcctccttaatatct

SEQ ID NO: 75477 - DNA, 20 bp, synthetic construct
  misc_feature 1..20: note = Description of Artificial Sequence: Synthetic oligonucleotide
  misc_feature 1..20: note = Target: SCN10A; (+) strand; PAM type: YTN; PAM sequence: CTT
  source 1..20: mol_type = other DNA
ctgcctccttaatatcttct

SEQ ID NO: 75478 - DNA, 20 bp, synthetic construct
  misc_feature 1..20: note = Description of Artificial Sequence: Synthetic oligonucleotide
  misc_feature 1..20: note = Target: SCN10A; (+) strand; PAM type: YTN; PAM sequence: TTC
  source 1..20: mol_type = other DNA
tgcctccttaatatcttctc

SEQ ID NO: 75479 - DNA, 20 bp, synthetic construct
  misc_feature 1..20: note = Description of Artificial Sequence: Synthetic oligonucleotide
  misc_feature 1..20: note = Target: SCN10A; (+) strand; PAM type: YTN; PAM sequence: CTG
  source 1..20: mol_type = other DNA
cctccttaatatcttctctt

SEQ ID NO: 75480 - DNA, 20 bp, synthetic construct
  misc_feature 1..20: note = Description of Artificial Sequence: Synthetic oligonucleotide
  misc_feature 1..20: note = Target: SCN10A; (+) strand; PAM type: YTN; PAM sequence: CTC
  source 1..20: mol_type = other DNA
cttaatatcttctcttcata

SEQ ID NO: 75481 - DNA, 20 bp, synthetic construct
  misc_feature 1..20: note = Description of Artificial Sequence: Synthetic oligonucleotide
  misc_feature 1..20: note = Target: SCN10A; (+) strand; PAM type: YTN; PAM sequence: CTT
  source 1..20: mol_type = other DNA
aatatcttctcttcatatct

SEQ ID NO: 75482 - DNA, 20 bp, synthetic construct
  misc_feature 1..20: note = Description of Artificial Sequence: Synthetic oligonucleotide
  misc_feature 1..20: note = Target: SCN10A; (+) strand; PAM type: YTN; PAM sequence: TTA
  source 1..20: mol_type = other DNA
atatcttctcttcatatctc

SEQ ID NO: 75483 - DNA, 20 bp, synthetic construct
  misc_feature 1..20: note = Description of Artificial Sequence: Synthetic oligonucleotide
  misc_feature 1..20: note = Target: SCN10A; (+) strand; PAM type: YTN; PAM sequence: CTT
  source 1..20: mol_type = other DNA
ctcttcatatctctctaacc

SEQ ID NO: 75484 - DNA, 20 bp, synthetic construct
  misc_feature 1..20: note = Description of Artificial Sequence: Synthetic oligonucleotide
  misc_feature 1..20: note = Target: SCN10A; (+) strand; PAM type: YTN; PAM sequence: TTC
  source 1..20: mol_type = other DNA
tcttcatatctctctaacct

SEQ ID NO: 75485 - DNA, 20 bp, synthetic construct
  misc_feature 1..20: note = Description of Artificial Sequence: Synthetic oligonucleotide
  misc_feature 1..20: note = Target: SCN10A; (+) strand; PAM type: YTN; PAM sequence: CTC
  source 1..20: mol_type = other DNA
ttcatatctctctaacctct

SEQ ID NO: 75486 - DNA, 20 bp, synthetic construct
  misc_feature 1..20: note = Description of Artificial Sequence: Synthetic oligonucleotide
  misc_feature 1..20: note = Target: SCN10A; (+) strand; PAM type: YTN; PAM sequence: CTT
  source 1..20: mol_type = other DNA
catatctctctaacctctcc

SEQ ID NO: 75487 - DNA, 20 bp, synthetic construct
  misc_feature 1..20: note = Description of Artificial Sequence: Synthetic oligonucleotide
  misc_feature 1..20: note = Target: SCN10A; (+) strand; PAM type: YTN; PAM sequence: TTC
  source 1..20: mol_type = other DNA
atatctctctaacctctcca

SEQ ID NO: 75488 - DNA, 20 bp, synthetic construct
  misc_feature 1..20: note = Description of Artificial Sequence: Synthetic oligonucleotide
  misc_feature 1..20: note = Target: SCN10A; (+) strand; PAM type: YTN; PAM sequence: CTC
  source 1..20: mol_type = other DNA
tctaacctctccatcatact

SEQ ID NO: 75489 - DNA, 20 bp, synthetic construct
  misc_feature 1..20: note = Description of Artificial Sequence: Synthetic oligonucleotide
  misc_feature 1..20: note = Target: SCN10A; (+) strand; PAM type: YTN; PAM sequence: CTC
  source 1..20: mol_type = other DNA
taacctctccatcatactgc

SEQ ID NO: 75490 - DNA, 20 bp, synthetic construct
  misc_feature 1..20: note = Description of Artificial Sequence: Synthetic oligonucleotide
  misc_feature 1..20: note = Target: SCN10A; (+) strand; PAM type: YTN; PAM sequence: CTA
  source 1..20: mol_type = other DNA
acctctccatcatactgctg

SEQ ID NO: 75491 - DNA, 20 bp, synthetic construct
  misc_feature 1..20: note = Description of Artificial Sequence: Synthetic oligonucleotide
  misc_feature 1..20: note = Target: SCN10A; (+) strand; PAM type: YTN; PAM sequence: CTC
  source 1..20: mol_type = other DNA
tccatcatactgctggtcca

SEQ ID NO: 75492 - DNA, 20 bp, synthetic construct
  misc_feature 1..20: note = Description of Artificial Sequence: Synthetic oligonucleotide
  misc_feature 1..20: note = Target: SCN10A; (+) strand; PAM type: YTN; PAM sequence: CTC
  source 1..20: mol_type = other DNA
catcatactgctggtccaat

SEQ ID NO: 75493 - DNA, 20 bp, synthetic construct
  misc_feature 1..20: note = Description of Artificial Sequence: Synthetic oligonucleotide
  misc_feature 1..20: note = Target: SCN10A; (+) strand; PAM type: YTN; PAM sequence: CTG
  source 1..20: mol_type = other DNA
ctggtccaatcactgtcatc

SEQ ID NO: 75494 - DNA, 20 bp, synthetic construct
  misc_feature 1..20: note = Description of Artificial Sequence: Synthetic oligonucleotide
  misc_feature 1..20: note = Target: SCN10A; (+) strand; PAM type: YTN; PAM sequence: CTG
  source 1..20: mol_type = other DNA
gtccaatcactgtcatctca

SEQ ID NO: 75495 - DNA, 20 bp, synthetic construct
  misc_feature 1..20: note = Description of Artificial Sequence: Synthetic oligonucleotide
  misc_feature 1..20: note = Target: SCN10A; (+) strand; PAM type: YTN; PAM sequence: CTG
  source 1..20: mol_type = other DNA
tcatctcactggcctcgtat

SEQ ID NO: 75496 - DNA, 20 bp, synthetic construct
  misc_feature 1..20: note = Description of Artificial Sequence: Synthetic oligonucleotide
  misc_feature 1..20: note = Target: SCN10A; (+) strand; PAM type: YTN; PAM sequence: CTC
  source 1..20: mol_type = other DNA
actggcctcgtatgtgtcat

SEQ ID NO: 75497 - DNA, 20 bp, synthetic construct
  misc_feature 1..20: note = Description of Artificial Sequence: Synthetic oligonucleotide
  misc_feature 1..20: note = Target: SCN10A; (+) strand; PAM type: YTN; PAM sequence: CTG
  source 1..20: mol_type = other DNA
gcctcgtatgtgtcattttg

SEQ ID NO: 75498 - DNA, 20 bp, synthetic construct
  misc_feature 1..20: note = Description of Artificial Sequence: Synthetic oligonucleotide
  misc_feature 1..20: note = Target: SCN10A; (+) strand; PAM type: YTN; PAM sequence: CTC
  source 1..20: mol_type = other DNA
gtatgtgtcattttgattcc

SEQ ID NO: 75499 - DNA, 20 bp, synthetic construct
  misc_feature 1..20: note = Description of Artificial Sequence: Synthetic oligonucleotide
  misc_feature 1..20: note = Target: SCN10A; (+) strand; PAM type: YTN; PAM sequence: TTT
  source 1..20: mol_type = other DNA
tgattcccctttagtccttt

SEQ ID NO: 75500 - DNA, 20 bp, synthetic construct
  misc_feature 1..20: note = Description of Artificial Sequence: Synthetic oligonucleotide
  misc_feature 1..20: note = Target: SCN10A; (+) strand; PAM type: YTN; PAM sequence: TTT
  source 1..20: mol_type = other DNA
gattcccctttagtcctttc

SEQ ID NO: 75501 - DNA, 20 bp, synthetic construct
  misc_feature 1..20: note = Description of Artificial Sequence: Synthetic oligonucleotide
  misc_feature 1..20: note = Target: SCN10A; (+) strand; PAM type: YTN; PAM sequence: TTG
  source 1..20: mol_type = other DNA
attcccctttagtcctttct

SEQ ID NO: 75502 - DNA, 20 bp, synthetic construct
  misc_feature 1..20: note = Description of Artificial Sequence: Synthetic oligonucleotide
  misc_feature 1..20: note = Target: SCN10A; (+) strand; PAM type: YTN; PAM sequence: TTC
  source 1..20: mol_type = other DNA
ccctttagtcctttctaacc

SEQ ID NO: 75503 - DNA, 20 bp, synthetic construct
  misc_feature 1..20: note = Description of Artificial Sequence: Synthetic oligonucleotide
  misc_feature 1..20: note = Target: SCN10A; (+) strand; PAM type: YTN; PAM sequence: CTT
  source 1..20: mol_type = other DNA
tagtcctttctaacctattc

SEQ ID NO: 75504 - DNA, 20 bp, synthetic construct
  misc_feature 1..20: note = Description of Artificial Sequence: Synthetic oligonucleotide
  misc_feature 1..20: note = Target: SCN10A; (+) strand; PAM type: YTN; PAM sequence: TTT
  source 1..20: mol_type = other DNA
agtcctttctaacctattct

SEQ ID NO: 75505 - DNA, 20 bp, synthetic construct
  misc_feature 1..20: note = Description of Artificial Sequence: Synthetic oligonucleotide
  misc_feature 1..20: note = Target: SCN10A; (+) strand; PAM type: YTN; PAM sequence: TTA
  source 1..20: mol_type = other DNA
gtcctttctaacctattctc

SEQ ID NO: 75506 - DNA, 20 bp, synthetic construct
  misc_feature 1..20: note = Description of Artificial Sequence: Synthetic oligonucleotide
  misc_feature 1..20: note = Target: SCN10A; (+) strand; PAM type: YTN; PAM sequence: CTT
  source 1..20: mol_type = other DNA
tctaacctattctccaacag

SEQ ID NO: 75507 - DNA, 20 bp, synthetic construct
  misc_feature 1..20: note = Description of Artificial Sequence: Synthetic oligonucleotide
  misc_feature 1..20: note = Target: SCN10A; (+) strand; PAM type: YTN; PAM sequence: TTT
  source 1..20: mol_type = other DNA
ctaacctattctccaacagt

SEQ ID NO: 75508 - DNA, 20 bp, synthetic construct
  misc_feature 1..20: note = Description of Artificial Sequence: Synthetic oligonucleotide
  misc_feature 1..20: note = Target: SCN10A; (+) strand; PAM type: YTN; PAM sequence: TTC
  source 1..20: mol_type = other DNA
taacctattctccaacagtg

SEQ ID NO: 75509 - DNA, 20 bp, synthetic construct
  misc_feature 1..20: note = Description of Artificial Sequence: Synthetic oligonucleotide
  misc_feature 1..20: note = Target: SCN10A; (+) strand; PAM type: YTN; PAM sequence: CTA
  source 1..20: mol_type = other DNA
acctattctccaacagtggc

SEQ ID NO: 75510 - DNA, 20 bp, synthetic construct
  misc_feature 1..20: note = Description of Artificial Sequence: Synthetic oligonucleotide
  misc_feature 1..20: note = Target: SCN10A; (+) strand; PAM type: YTN; PAM sequence: CTA
  source 1..20: mol_type = other DNA
ttctccaacagtggccaaat

SEQ ID NO: 75511 - DNA, 20 bp, synthetic construct
  misc_feature 1..20: note = Description of Artificial Sequence: Synthetic oligonucleotide
  misc_feature 1..20: note = Target: SCN10A; (+) strand; PAM type: YTN; PAM sequence: TTC
  source 1..20: mol_type = other DNA
tccaacagtggccaaatgat

SEQ ID NO: 75512 - DNA, 20 bp, synthetic construct
  misc_feature 1..20: note = Description of Artificial Sequence: Synthetic oligonucleotide
  misc_feature 1..20: note = Target: SCN10A; (+) strand; PAM type: YTN; PAM sequence: CTC
  source 1..20: mol_type = other DNA
caacagtggccaaatgatat

SEQ ID NO: 75513 - DNA, 20 bp, synthetic construct
  misc_feature 1..20: note = Description of Artificial Sequence: Synthetic oligonucleotide
  misc_feature 1..20: note = Target: SCN10A; (+) strand; PAM type: YTN; PAM sequence: TTT
  source 1..20: mol_type = other DNA
ctaaaatgaaaatctggtta

SEQ ID NO: 75514 - DNA, 20 bp, synthetic construct
  misc_feature 1..20: note = Description of Artificial Sequence: Synthetic oligonucleotide
  misc_feature 1..20: note = Target: SCN10A; (+) strand; PAM type: YTN; PAM sequence: TTC
  source 1..20: mol_type = other DNA
taaaatgaaaatctggttat

SEQ ID NO: 75515 - DNA, 20 bp, synthetic construct
  misc_feature 1..20: note = Description of Artificial Sequence: Synthetic oligonucleotide
  misc_feature 1..20: note = Target: SCN10A; (+) strand; PAM type: YTN; PAM sequence: CTA
  source 1..20: mol_type = other DNA
aaatgaaaatctggttatgt

SEQ ID NO: 75516 - DNA, 20 bp, synthetic construct
  misc_feature 1..20: note = Description of Artificial Sequence: Synthetic oligonucleotide
  misc_feature 1..20: note = Target: SCN10A; (+) strand; PAM type: YTN; PAM sequence: CTG
  source 1..20: mol_type = other DNA
gttatgtgatatctttattt

SEQ ID NO: 75517 - DNA, 20 bp, synthetic construct
  misc_feature 1..20: note = Description of Artificial Sequence: Synthetic oligonucleotide
  misc_feature 1..20: note = Target: SCN10A; (+) strand; PAM type: YTN; PAM sequence: TTA
  source 1..20: mol_type = other DNA
tgtgatatctttatttaaaa

SEQ ID NO: 75518 - DNA, 20 bp, synthetic construct
  misc_feature 1..20: note = Description of Artificial Sequence: Synthetic oligonucleotide
  misc_feature 1..20: note = Target: SCN10A; (+) strand; PAM type: YTN; PAM sequence: CTT
  source 1..20: mol_type = other DNA
tatttaaaatcattctaaag

SEQ ID NO: 75519 - DNA, 20 bp, synthetic construct
  misc_feature 1..20: note = Description of Artificial Sequence: Synthetic oligonucleotide
  misc_feature 1..20: note = Target: SCN10A; (+) strand; PAM type: YTN; PAM sequence: TTT
  source 1..20: mol_type = other DNA
atttaaaatcattctaaagc

SEQ ID NO: 75520 - DNA, 20 bp, synthetic construct
  misc_feature 1..20: note = Description of Artificial Sequence: Synthetic oligonucleotide
  misc_feature 1..20: note = Target: SCN10A; (+) strand; PAM type: YTN; PAM sequence: TTA
  source 1..20: mol_type = other DNA
tttaaaatcattctaaagct

SEQ ID NO: 75521 - DNA, 20 bp, synthetic construct
  misc_feature 1..20: note = Description of Artificial Sequence: Synthetic oligonucleotide
  misc_feature 1..20: note = Target: SCN10A; (+) strand; PAM type: YTN; PAM sequence: TTT
  source 1..20: mol_type = other DNA
aaaatcattctaaagctctc

SEQ ID NO: 75522 - DNA, 20 bp, synthetic construct
  misc_feature 1..20: note = Description of Artificial Sequence: Synthetic oligonucleotide
  misc_feature 1..20: note = Target: SCN10A; (+) strand; PAM type: YTN; PAM sequence: TTA
  source 1..20: mol_type = other DNA
aaatcattctaaagctctcc

SEQ ID NO: 75523 - DNA, 20 bp, synthetic construct
  misc_feature 1..20: note = Description of Artificial Sequence: Synthetic oligonucleotide
  misc_feature 1..20: note = Target: SCN10A; (+) strand; PAM type: YTN; PAM sequence: TTC
  source 1..20: mol_type = other DNA
taaagctctccatagcactc

SEQ ID NO: 75524 - DNA, 20 bp, synthetic construct
  misc_feature 1..20: note = Description of Artificial Sequence: Synthetic oligonucleotide
  misc_feature 1..20: note = Target: SCN10A; (+) strand; PAM type: YTN; PAM sequence: CTA
  source 1..20: mol_type = other DNA
aagctctccatagcactcaa

SEQ ID NO: 75525 - DNA, 20 bp, synthetic construct
  misc_feature 1..20: note = Description of Artificial Sequence: Synthetic oligonucleotide
  misc_feature 1..20: note = Target: SCN10A; (+) strand; PAM type: YTN; PAM sequence: CTC
  source 1..20: mol_type = other DNA
tccatagcactcaagataac

SEQ ID NO: 75526 - DNA, 20 bp, synthetic construct
  misc_feature 1..20: note = Description of Artificial Sequence: Synthetic oligonucleotide
  misc_feature 1..20: note = Target: SCN10A; (+) strand; PAM type: YTN; PAM sequence: CTC
  source 1..20: mol_type = other DNA
catagcactcaagataaccc

SEQ ID NO: 75527 - DNA, 20 bp, synthetic construct
  misc_feature 1..20: note = Description of Artificial Sequence: Synthetic oligonucleotide
  misc_feature 1..20: note = Target: SCN10A; (+) strand; PAM type: YTN; PAM sequence: CTC
  source 1..20: mol_type = other DNA
aagataacccaaactgtgcg

SEQ ID NO: 75528 - DNA, 20 bp, synthetic construct
  misc_feature 1..20: note = Description of Artificial Sequence: Synthetic oligonucleotide
  misc_feature 1..20: note = Target: SCN10A; (+) strand; PAM type: YTN; PAM sequence: CTG
  source 1..20: mol_type = other DNA
tgcgctgacctctccagcat

SEQ ID NO: 75529 - DNA, 20 bp, synthetic construct
  misc_feature 1..20: note = Description of Artificial Sequence: Synthetic oligonucleotide
  misc_feature 1..20: note = Target: SCN10A; (+) strand; PAM type: YTN; PAM sequence: CTG
  source 1..20: mol_type = other DNA
acctctccagcatggtagtc

SEQ ID NO: 75530 - DNA, 20 bp, synthetic construct
  misc_feature 1..20: note = Description of Artificial Sequence: Synthetic oligonucleotide
  misc_feature 1..20: note = Target: SCN10A; (+) strand; PAM type: YTN; PAM sequence: CTC
  source 1..20: mol_type = other DNA
tccagcatggtagtccccag

SEQ ID NO: 75531 - DNA, 20 bp, synthetic construct
  misc_feature 1..20: note = Description of Artificial Sequence: Synthetic oligonucleotide
  misc_feature 1..20: note = Target: SCN10A; (+) strand; PAM type: YTN; PAM sequence: CTC
  source 1..20: mol_type = other DNA
cagcatggtagtccccagcc

SEQ ID NO: 75532 - DNA, 20 bp, synthetic construct
  misc_feature 1..20: note = Description of Artificial Sequence: Synthetic oligonucleotide
  misc_feature 1..20: note = Target: SCN10A; (+) strand; PAM type: YTN; PAM sequence: CTA
  source 1..20: mol_type = other DNA
cttttataagtttatccttg

SEQ ID NO: 75533 - DNA, 20 bp, synthetic construct
  misc_feature 1..20: note = Description of Artificial Sequence: Synthetic oligonucleotide
  misc_feature 1..20: note = Target: SCN10A; (+) strand; PAM type: YTN; PAM sequence: CTT
  source 1..20: mol_type = other DNA
ttataagtttatccttgaat

SEQ ID NO: 75534 - DNA, 20 bp, synthetic construct
  misc_feature 1..20: note = Description of Artificial Sequence: Synthetic oligonucleotide
  misc_feature 1..20: note = Target: SCN10A; (+) strand; PAM type: YTN; PAM sequence: TTT
  source 1..20: mol_type = other DNA
tataagtttatccttgaatt

SEQ ID NO: 75535 - DNA, 20 bp, synthetic construct
  misc_feature 1..20: note = Description of Artificial Sequence: Synthetic oligonucleotide
  misc_feature 1..20: note = Target: SCN10A; (+) strand; PAM type: YTN; PAM sequence: TTT
  source 1..20: mol_type = other DNA
ataagtttatccttgaattt

SEQ ID NO: 75536 - DNA, 20 bp, synthetic construct
  misc_feature 1..20: note = Description of Artificial Sequence: Synthetic oligonucleotide
  misc_feature 1..20: note = Target: SCN10A; (+) strand; PAM type: YTN; PAM sequence: TTA
  source 1..20: mol_type = other DNA
taagtttatccttgaatttg

SEQ ID NO: 75537 - DNA, 20 bp, synthetic construct
  misc_feature 1..20: note = Description of Artificial Sequence: Synthetic oligonucleotide
  misc_feature 1..20: note = Target: SCN10A; (+) strand; PAM type: YTN; PAM sequence: TTT
  source 1..20: mol_type = other DNA
atccttgaatttgacccatt

SEQ ID NO: 75538 - DNA, 20 bp, synthetic construct
  misc_feature 1..20: note = Description of Artificial Sequence: Synthetic oligonucleotide
  misc_feature 1..20: note = Target: SCN10A; (+) strand; PAM type: YTN; PAM sequence: TTA
  source 1..20: mol_type = other DNA
tccttgaatttgacccattc

SEQ ID NO: 75539 - DNA, 20 bp, synthetic construct
  misc_feature 1..20: note = Description of Artificial Sequence: Synthetic oligonucleotide
  misc_feature 1..20: note = Target: SCN10A; (+) strand; PAM type: YTN; PAM sequence: CTT
  source 1..20: mol_type = other DNA
gaatttgacccattcttttt

SEQ ID NO: 75540 - DNA, 20 bp, synthetic construct
  misc_feature 1..20: note = Description of Artificial Sequence: Synthetic oligonucleotide
  misc_feature 1..20: note = Target: SCN10A; (+) strand; PAM type: YTN; PAM sequence: TTG
  source 1..20: mol_type = other DNA
aatttgacccattctttttt

SEQ ID NO: 75541 - DNA, 20 bp, synthetic construct
  misc_feature 1..20: note = Description of Artificial Sequence: Synthetic oligonucleotide
  misc_feature 1..20: note = Target: SCN10A; (+) strand; PAM type: YTN; PAM sequence: TTT
  source 1..20: mol_type = other DNA
gacccattcttttttatgtt

SEQ ID NO: 75542 - DNA, 20 bp, synthetic construct
  misc_feature 1..20: note = Description of Artificial Sequence: Synthetic oligonucleotide
  misc_feature 1..20: note = Target: SCN10A; (+) strand; PAM type: YTN; PAM sequence: TTG
  source 1..20: mol_type = other DNA
acccattcttttttatgtta

SEQ ID NO: 75543 - DNA, 20 bp, synthetic construct
  misc_feature 1..20: note = Description of Artificial Sequence: Synthetic oligonucleotide
  misc_feature 1..20: note = Target: SCN10A; (+) strand; PAM type: YTN; PAM sequence: TTC
  source 1..20: mol_type = other DNA
ttttttatgttaaggctttt

SEQ ID NO: 75544 - DNA, 20 bp, synthetic construct
  misc_feature 1..20: note = Description of Artificial Sequence: Synthetic oligonucleotide
  misc_feature 1..20: note = Target: SCN10A; (+) strand; PAM type: YTN; PAM sequence: CTT
  source 1..20: mol_type = other DNA
ttttatgttaaggcttttcc

SEQ ID NO: 75545 - DNA, 20 bp, synthetic construct
  misc_feature 1..20: note = Description of Artificial Sequence: Synthetic oligonucleotide
  misc_feature 1..20: note = Target: SCN10A; (+) strand; PAM type: YTN; PAM sequence: TTT
  source 1..20: mol_type = other DNA
tttatgttaaggcttttcca

SEQ ID NO: 75546 - DNA, 20 bp, synthetic construct
  misc_feature 1..20: note = Description of Artificial Sequence: Synthetic oligonucleotide
  misc_feature 1..20: note = Target: SCN10A; (+) strand; PAM type: YTN; PAM sequence: TTT
  source 1..20: mol_type = other DNA
ttatgttaaggcttttccat

SEQ ID NO: 75547 - DNA, 20 bp, synthetic construct
  misc_feature 1..20: note = Description of Artificial Sequence: Synthetic oligonucleotide
  misc_feature 1..20: note = Target: SCN10A; (+) strand; PAM type: YTN; PAM sequence: TTT
  source 1..20: mol_type = other DNA
tatgttaaggcttttccata

SEQ ID NO: 75548 - DNA, 20 bp, synthetic construct
  misc_feature 1..20: note = Description of Artificial Sequence: Synthetic oligonucleotide
  misc_feature 1..20: note = Target: SCN10A; (+) strand; PAM type: YTN; PAM sequence: TTT
  source 1..20: mol_type = other DNA
atgttaaggcttttccatat

SEQ ID NO: 75549 - DNA, 20 bp, synthetic construct
  misc_feature 1..20: note = Description of Artificial Sequence: Synthetic oligonucleotide
  misc_feature 1..20: note = Target: SCN10A; (+) strand; PAM type: YTN; PAM sequence: TTA
  source 1..20: mol_type = other DNA
tgttaaggcttttccatatt

SEQ ID NO: 75550 - DNA, 20 bp, synthetic construct
  misc_feature 1..20: note = Description of Artificial Sequence: Synthetic oligonucleotide
  misc_feature 1..20: note = Target: SCN10A; (+) strand; PAM type: YTN; PAM sequence: TTA
  source 1..20: mol_type = other DNA
aggcttttccatattcccct

SEQ ID NO: 75551 - DNA, 20 bp, synthetic construct
  misc_feature 1..20: note = Description of Artificial Sequence: Synthetic oligonucleotide
  misc_feature 1..20: note = Target: SCN10A; (+) strand; PAM type: YTN; PAM sequence: CTT
  source 1..20: mol_type = other DNA
ttccatattccccttccttt

SEQ ID NO: 75552 - DNA, 20 bp, synthetic construct
  misc_feature 1..20: note = Description of Artificial Sequence: Synthetic oligonucleotide
  misc_feature 1..20: note = Target: SCN10A; (+) strand; PAM type: YTN; PAM sequence: TTT
  source 1..20: mol_type = other DNA
tccatattccccttcctttg

SEQ ID NO: 75553 - DNA, 20 bp, synthetic construct
  misc_feature 1..20: note = Description of Artificial Sequence: Synthetic oligonucleotide
  misc_feature 1..20: note = Target: SCN10A; (+) strand; PAM type: YTN; PAM sequence: TTT
  source 1..20: mol_type = other DNA
ccatattccccttcctttgc

SEQ ID NO: 75554 - DNA, 20 bp, synthetic construct
  misc_feature 1..20: note = Description of Artificial Sequence: Synthetic oligonucleotide
  misc_feature 1..20: note = Target: SCN10A; (+) strand; PAM type: YTN; PAM sequence: TTC
  source 1..20: mol_type = other DNA
catattccccttcctttgcc

SEQ ID NO: 75555 - DNA, 20 bp, synthetic construct
  misc_feature 1..20: note = Description of Artificial Sequence: Synthetic oligonucleotide
  misc_feature 1..20: note = Target: SCN10A; (+) strand; PAM type: YTN; PAM sequence: TTC
  source 1..20: mol_type = other DNA
cccttcctttgcctaaaatt

SEQ ID NO: 75556 - DNA, 20 bp, synthetic construct
  misc_feature 1..20: note = Description of Artificial Sequence: Synthetic oligonucleotide
  misc_feature 1..20: note = Target: SCN10A; (+) strand; PAM type: YTN; PAM sequence: CTT
  source 1..20: mol_type = other DNA
cctttgcctaaaattatctt

SEQ ID NO: 75557 - DNA, 20 bp, synthetic construct
  misc_feature 1..20: note = Description of Artificial Sequence: Synthetic oligonucleotide
  misc_feature 1..20: note = Target: SCN10A; (+) strand; PAM type: YTN; PAM sequence: TTC
  source 1..20: mol_type = other DNA
ctttgcctaaaattatcttt

SEQ ID NO: 75558 - DNA, 20 bp, synthetic construct
  misc_feature 1..20: note = Description of Artificial Sequence: Synthetic oligonucleotide
  misc_feature 1..20: note = Target: SCN10A; (+) strand; PAM type: YTN; PAM sequence: CTT
  source 1..20: mol_type = other DNA
tgcctaaaattatctttcca

SEQ ID NO: 75559 - DNA, 20 bp, synthetic construct
  misc_feature 1..20: note = Description of Artificial Sequence: Synthetic oligonucleotide
  misc_feature 1..20: note = Target: SCN10A; (+) strand; PAM type: YTN; PAM sequence: TTT
  source 1..20: mol_type = other DNA
gcctaaaattatctttccac

SEQ ID NO: 75560 - DNA, 20 bp, synthetic construct
  misc_feature 1..20: note = Description of Artificial Sequence: Synthetic oligonucleotide
  misc_feature 1..20: note = Target: SCN10A; (+) strand; PAM type: YTN; PAM sequence: TTG
  source 1..20: mol_type = other DNA
cctaaaattatctttccact

SEQ ID NO: 75561 - DNA, 20 bp, synthetic construct
  misc_feature 1..20: note = Description of Artificial Sequence: Synthetic oligonucleotide
  misc_feature 1..20: note = Target: SCN10A; (+) strand; PAM type: YTN; PAM sequence: CTA
  source 1..20: mol_type = other DNA
aaattatctttccactttat

SEQ ID NO: 75562 - DNA, 20 bp, synthetic construct
  misc_feature 1..20: note = Description of Artificial Sequence: Synthetic oligonucleotide
  misc_feature 1..20: note = Target: SCN10A; (+) strand; PAM type: YTN; PAM sequence: TTA
  source 1..20: mol_type = other DNA
tctttccactttattttgtc

SEQ ID NO: 75563 - DNA, 20 bp, synthetic construct
  misc_feature 1..20: note = Description of Artificial Sequence: Synthetic oligonucleotide
  misc_feature 1..20: note = Target: SCN10A; (+) strand; PAM type: YTN; PAM sequence: CTT
  source 1..20: mol_type = other DNA
tccactttattttgtctggc

SEQ ID NO: 75564 - DNA, 20 bp, synthetic construct
  misc_feature 1..20: note = Description of Artificial Sequence: Synthetic oligonucleotide
  misc_feature 1..20: note = Target: SCN10A; (+) strand; PAM type: YTN; PAM sequence: TTT
  source 1..20: mol_type = other DNA
ccactttattttgtctggct

SEQ ID NO: 75565 - DNA, 20 bp, synthetic construct
  misc_feature 1..20: note = Description of Artificial Sequence: Synthetic oligonucleotide
  misc_feature 1..20: note = Target: SCN10A; (+) strand; PAM type: YTN; PAM sequence: TTC
  source 1..20: mol_type = other DNA
cactttattttgtctggcta

SEQ ID NO: 75566 - DNA, 20 bp, synthetic construct
  misc_feature 1..20: note = Description of Artificial Sequence: Synthetic oligonucleotide
  misc_feature 1..20: note = Target: SCN10A; (+) strand; PAM type: YTN; PAM sequence: CTT
  source 1..20: mol_type = other DNA
tattttgtctggctaatcct

SEQ ID NO: 75567 - DNA, 20 bp, synthetic construct
  misc_feature 1..20: note = Description of Artificial Sequence: Synthetic oligonucleotide
  misc_feature 1..20: note = Target: SCN10A; (+) strand; PAM type: YTN; PAM sequence: TTT
  source 1..20: mol_type = other DNA
attttgtctggctaatcctc

SEQ ID NO: 75568 - DNA, 20 bp, synthetic construct
  misc_feature 1..20: note = Description of Artificial Sequence: Synthetic oligonucleotide
  misc_feature 1..20: note = Target: SCN10A; (+) strand; PAM type: YTN; PAM sequence: TTA
  source 1..20: mol_type = other DNA
ttttgtctggctaatcctct

SEQ ID NO: 75569 - DNA, 20 bp, synthetic construct
  misc_feature 1..20: note = Description of Artificial Sequence: Synthetic oligonucleotide
  misc_feature 1..20: note = Target: SCN10A; (+) strand; PAM type: YTN; PAM sequence: TTT
  source 1..20: mol_type = other DNA
tgtctggctaatcctctctt

SEQ ID NO: 75570 - DNA, 20 bp, synthetic construct
  misc_feature 1..20: note = Description of Artificial Sequence: Synthetic oligonucleotide
  misc_feature 1..20: note = Target: SCN10A; (+) strand; PAM type: YTN; PAM sequence: TTT
  source 1..20: mol_type = other DNA
gtctggctaatcctctctta

SEQ ID NO: 75571 - DNA, 20 bp, synthetic construct
  misc_feature 1..20: note = Description of Artificial Sequence: Synthetic oligonucleotide
  misc_feature 1..20: note = Target: SCN10A; (+) strand; PAM type: YTN; PAM sequence: TTG
  source 1..20: mol_type = other DNA
tctggctaatcctctcttat

SEQ ID NO: 75572 - DNA, 20 bp, synthetic construct
  misc_feature 1..20: note = Description of Artificial Sequence: Synthetic oligonucleotide
  misc_feature 1..20: note = Target: SCN10A; (+) strand; PAM type: YTN; PAM sequence: CTG
  source 1..20: mol_type = other DNA
gctaatcctctcttattctt

SEQ ID NO: 75573 - DNA, 20 bp, synthetic construct
  misc_feature 1..20: note = Description of Artificial Sequence: Synthetic oligonucleotide
  misc_feature 1..20: note = Target: SCN10A; (+) strand; PAM type: YTN; PAM sequence: CTA
  source 1..20: mol_type = other DNA
atcctctcttattcttgtac

SEQ ID NO: 75574 - DNA, 20 bp, synthetic construct
  misc_feature 1..20: note = Description of Artificial Sequence: Synthetic oligonucleotide
  misc_feature 1..20: note = Target: SCN10A; (+) strand; PAM type: YTN; PAM sequence: CTC
  source 1..20: mol_type = other DNA
tcttattcttgtactcttgg

SEQ ID NO: 75575 - DNA, 20 bp, synthetic construct
  misc_feature 1..20: note = Description of Artificial Sequence: Synthetic oligonucleotide
  misc_feature 1..20: note = Target: SCN10A; (+) strand; PAM type: YTN; PAM sequence: CTC
  source 1..20: mol_type = other DNA
ttattcttgtactcttggct

SEQ ID NO: 75576 - DNA, 20 bp, synthetic construct
  misc_feature 1..20: note = Description of Artificial Sequence: Synthetic oligonucleotide
  misc_feature 1..20: note = Target: SCN10A; (+) strand; PAM type: YTN; PAM sequence: CTT
  source 1..20: mol_type = other DNA
attcttgtactcttggcttt

SEQ ID NO: 75577 - DNA, 20 bp, synthetic construct
  misc_feature 1..20: note = Description of Artificial Sequence: Synthetic oligonucleotide
  misc_feature 1..20: note = Target: SCN10A; (+) strand; PAM type: YTN; PAM sequence: TTA
  source 1..20: mol_type = other DNA
ttcttgtactcttggctttg

SEQ ID NO: 75578 - DNA, 20 bp, synthetic construct
  misc_feature 1..20: note = Description of Artificial Sequence: Synthetic oligonucleotide
  misc_feature 1..20: note = Target: SCN10A; (+) strand; PAM type: YTN; PAM sequence: TTC
  source 1..20: mol_type = other DNA
ttgtactcttggctttgaga

SEQ ID NO: 75579 - DNA, 20 bp, synthetic construct
  misc_feature 1..20: note = Description of Artificial Sequence: Synthetic oligonucleotide
  misc_feature 1..20: note = Target: SCN10A; (+) strand; PAM type: YTN; PAM sequence: CTT
  source 1..20: mol_type = other DNA
gtactcttggctttgagaca

SEQ ID NO: 75580 - DNA, 20 bp, synthetic construct
  misc_feature 1..20: note = Description of Artificial Sequence: Synthetic oligonucleotide
  misc_feature 1..20: note = Target: SCN10A; (+) strand; PAM type: YTN; PAM sequence: TTG
  source 1..20: mol_type = other DNA
tactcttggctttgagacaa

SEQ ID NO: 75581 - DNA, 20 bp, synthetic construct
  misc_feature 1..20: note = Description of Artificial Sequence: Synthetic oligonucleotide
  misc_feature 1..20: note = Target: SCN10A; (+) strand; PAM type: YTN; PAM sequence: CTC
  source 1..20: mol_type = other DNA
ttggctttgagacaatttct

SEQ ID NO: 75582 - DNA, 20 bp, synthetic construct
  misc_feature 1..20: note = Description of Artificial Sequence: Synthetic oligonucleotide
  misc_feature 1..20: note = Target: SCN10A; (+) strand; PAM type: YTN; PAM sequence: CTT
  source 1..20: mol_type = other DNA
ggctttgagacaatttcttc

SEQ ID NO: 75583 - DNA, 20 bp, synthetic construct
  misc_feature 1..20: note = Description of Artificial Sequence: Synthetic oligonucleotide
  misc_feature 1..20: note = Target: SCN10A; (+) strand; PAM type: YTN; PAM sequence: TTG
  source 1..20: mol_type = other DNA
gctttgagacaatttcttcc

SEQ ID NO: 75584 - DNA, 20 bp, synthetic construct
  misc_feature 1..20: note = Description of Artificial Sequence: Synthetic oligonucleotide
  misc_feature 1..20: note = Target: SCN10A; (+) strand; PAM type: YTN; PAM sequence: CTT
  source 1..20: mol_type = other DNA
tgagacaatttcttccattt

SEQ ID NO: 75585 - DNA, 20 bp, synthetic construct
  misc_feature 1..20: note = Description of Artificial Sequence: Synthetic oligonucleotide
  misc_feature 1..20: note = Target: SCN10A; (+) strand; PAM type: YTN; PAM sequence: TTT
  source 1..20: mol_type = other DNA
gagacaatttcttccatttc

SEQ ID NO: 75586 - DNA, 20 bp, synthetic construct
  misc_feature 1..20: note = Description of Artificial Sequence: Synthetic oligonucleotide
  misc_feature 1..20: note = Target: SCN10A; (+) strand; PAM type: YTN; PAM sequence: TTG
  source 1..20: mol_type = other DNA
agacaatttcttccatttct

SEQ ID NO: 75587 - DNA, 20 bp, synthetic construct
  misc_feature 1..20: note = Description of Artificial Sequence: Synthetic oligonucleotide
  misc_feature 1..20: note = Target: SCN10A; (+) strand; PAM type: YTN; PAM sequence: TTT
  source 1..20: mol_type = other DNA
cttccatttctgacctatat

SEQ ID NO: 75588 - DNA, 20 bp, synthetic construct
  misc_feature 1..20: note = Description of Artificial Sequence: Synthetic oligonucleotide
  misc_feature 1..20: note = Target: SCN10A; (+) strand; PAM type: YTN; PAM sequence: TTC
  source 1..20: mol_type = other DNA
ttccatttctgacctatatg

SEQ ID NO: 75589 - DNA, 20 bp, synthetic construct
  misc_feature 1..20: note = Description of Artificial Sequence: Synthetic oligonucleotide
  misc_feature 1..20: note = Target: SCN10A; (+) strand; PAM type: YTN; PAM sequence: CTT
  source 1..20: mol_type = other DNA
ccatttctgacctatatgaa

SEQ ID NO: 75590 - DNA, 20 bp, synthetic construct
  misc_feature 1..20: note = Description of Artificial Sequence: Synthetic oligonucleotide
  misc_feature 1..20: note = Target: SCN10A; (+) strand; PAM type: YTN; PAM sequence: TTC
  source 1..20: mol_type = other DNA
catttctgacctatatgaag

SEQ ID NO: 75591 - DNA, 20 bp, synthetic construct
  misc_feature 1..20: note = Description of Artificial Sequence: Synthetic oligonucleotide
  misc_feature 1..20: note = Target: SCN10A; (+) strand; PAM type: YTN; PAM sequence: TTT
  source 1..20: mol_type = other DNA
ctgacctatatgaagtctat

SEQ ID NO: 75592 - DNA, 20 bp, synthetic construct
  misc_feature 1..20: note = Description of Artificial Sequence: Synthetic oligonucleotide
  misc_feature 1..20: note = Target: SCN10A; (+) strand; PAM type: YTN; PAM sequence: TTC
  source 1..20: mol_type = other DNA
tgacctatatgaagtctatg

SEQ ID NO: 75593 - DNA, 20 bp, synthetic construct
  misc_feature 1..20: note = Description of Artificial Sequence: Synthetic oligonucleotide
  misc_feature 1..20: note = Target: SCN10A; (+) strand; PAM type: YTN; PAM sequence: CTG
  source 1..20: mol_type = other DNA
acctatatgaagtctatgtt

SEQ ID NO: 75594 - DNA, 20 bp, synthetic construct
  misc_feature 1..20: note = Description of Artificial Sequence: Synthetic oligonucleotide
  misc_feature 1..20: note = Target: SCN10A; (+) strand; PAM type: YTN; PAM sequence: CTA
  source 1..20: mol_type = other DNA
tatgaagtctatgttaggat

SEQ ID NO: 75595 - DNA, 20 bp, synthetic construct
  misc_feature 1..20: note = Description of Artificial Sequence: Synthetic oligonucleotide
  misc_feature 1..20: note = Target: SCN10A; (+) strand; PAM type: YTN; PAM sequence: CTA
  source 1..20: mol_type = other DNA
tgttaggattcctgtttcat

SEQ ID NO: 75596 - DNA, 20 bp, synthetic construct
  misc_feature 1..20: note = Description of Artificial Sequence: Synthetic oligonucleotide
  misc_feature 1..20: note = Target: SCN10A; (+) strand; PAM type: YTN; PAM sequence: TTA
  source 1..20: mol_type = other DNA
ggattcctgtttcatgttcc

SEQ ID NO: 75597 - DNA, 20 bp, synthetic construct
  misc_feature 1..20: note = Description of Artificial Sequence: Synthetic oligonucleotide
  misc_feature 1..20: note = Target: SCN10A; (+) strand; PAM type: YTN; PAM sequence: TTC
  source 1..20: mol_type = other DNA
ctgtttcatgttcccataac

SEQ ID NO: 75598 - DNA, 20 bp, synthetic construct
  misc_feature 1..20: note = Description of Artificial Sequence: Synthetic oligonucleotide
  misc_feature 1..20: note = Target: SCN10A; (+) strand; PAM type: YTN; PAM sequence: CTG
  source 1..20: mol_type = other DNA
tttcatgttcccataactct

SEQ ID NO: 75599 - DNA, 20 bp, synthetic construct
  misc_feature 1..20: note = Description of Artificial Sequence: Synthetic oligonucleotide
  misc_feature 1..20: note = Target: SCN10A; (+) strand; PAM type: YTN; PAM sequence: TTT
  source 1..20: mol_type = other DNA
catgttcccataactctctg

SEQ ID NO: 75600 - DNA, 20 bp, synthetic construct
  misc_feature 1..20: note = Description of Artificial Sequence: Synthetic oligonucleotide
  misc_feature 1..20: note = Target: SCN10A; (+) strand; PAM type: YTN; PAM sequence: TTC
  source 1..20: mol_type = other DNA
atgttcccataactctctgc

SEQ ID NO: 75601 - DNA, 20 bp, synthetic construct
  misc_feature 1..20: note = Description of Artificial Sequence: Synthetic oligonucleotide
  misc_feature 1..20: note = Target: SCN10A; (+) strand; PAM type: YTN; PAM sequence: TTC
  source 1..20: mol_type = other DNA
ccataactctctgcactttc

SEQ ID NO: 75602 - DNA, 20 bp, synthetic construct
  misc_feature 1..20: note = Description of Artificial Sequence: Synthetic oligonucleotide
  misc_feature 1..20: note = Target: SCN10A; (+) strand; PAM type: YTN; PAM sequence: CTC
  source 1..20: mol_type = other DNA
tctgcactttctctataaac

SEQ ID NO: 75603 - DNA, 20 bp, synthetic construct
  misc_feature 1..20: note = Description of Artificial Sequence: Synthetic oligonucleotide
  misc_feature 1..20: note = Target: SCN10A; (+) strand; PAM type: YTN; PAM sequence: CTC
  source 1..20: mol_type = other DNA
tgcactttctctataaacat

SEQ ID NO: 75604 - DNA, 20 bp, synthetic construct
  misc_feature 1..20: note = Description of Artificial Sequence: Synthetic oligonucleotide
  misc_feature 1..20: note = Target: SCN10A; (+) strand; PAM type: YTN; PAM sequence: CTG
  source 1..20: mol_type = other DNA
cactttctctataaacatct

SEQ ID NO: 75605 - DNA, 20 bp, synthetic construct
  misc_feature 1..20: note = Description of Artificial Sequence: Synthetic oligonucleotide
  misc_feature 1..20: note = Target: SCN10A; (+) strand; PAM type: YTN; PAM sequence: CTT
  source 1..20: mol_type = other DNA
tctctataaacatctgattt

SEQ ID NO: 75606 - DNA, 20 bp, synthetic construct
  misc_feature 1..20: note = Description of Artificial Sequence: Synthetic oligonucleotide
  misc_feature 1..20: note = Target: SCN10A; (+) strand; PAM type: YTN; PAM sequence: TTT
  source 1..20: mol_type = other DNA
ctctataaacatctgatttg

SEQ ID NO: 75607 - DNA, 20 bp, synthetic construct
  misc_feature 1..20: note = Description of Artificial Sequence: Synthetic oligonucleotide
  misc_feature 1..20: note = Target: SCN10A; (+) strand; PAM type: YTN; PAM sequence: TTC
  source 1..20: mol_type = other DNA
tctataaacatctgatttgt

SEQ ID NO: 75608 - DNA, 20 bp, synthetic construct
  misc_feature 1..20: note = Description of Artificial Sequence: Synthetic oligonucleotide
  misc_feature 1..20: note = Target: SCN10A; (+) strand; PAM type: YTN; PAM sequence: CTC
  source 1..20: mol_type = other DNA
tataaacatctgatttgtaa

SEQ ID NO: 75609 - DNA, 20 bp, synthetic construct
  misc_feature 1..20: note = Description of Artificial Sequence: Synthetic oligonucleotide
  misc_feature 1..20: note = Target: SCN10A; (+) strand; PAM type: YTN; PAM sequence: CTA
  source 1..20: mol_type = other DNA
taaacatctgatttgtaatt

SEQ ID NO: 75610 - DNA, 20 bp, synthetic construct
  misc_feature 1..20: note = Description of Artificial Sequence: Synthetic oligonucleotide
  misc_feature 1..20: note = Target: SCN10A; (+) strand; PAM type: YTN; PAM sequence: CTG
  source 1..20: mol_type = other DNA
atttgtaatttctgtttgcc

SEQ ID NO: 75611 - DNA, 20 bp, synthetic construct
  misc_feature 1..20: note = Description of Artificial Sequence: Synthetic oligonucleotide
  misc_feature 1..20: note = Target: SCN10A; (+) strand; PAM type: YTN; PAM sequence: TTT
  source 1..20: mol_type = other DNA
gtaatttctgtttgcctttc

SEQ ID NO: 75612 - DNA, 20 bp, synthetic construct
  misc_feature 1..20: note = Description of Artificial Sequence: Synthetic oligonucleotide
  misc_feature 1..20: note = Target: SCN10A; (+) strand; PAM type: YTN; PAM sequence: TTG
  source 1..20: mol_type = other DNA
taatttctgtttgcctttct

SEQ ID NO: 75613 - DNA, 20 bp, synthetic construct
  misc_feature 1..20: note = Description of Artificial Sequence: Synthetic oligonucleotide
  misc_feature 1..20: note = Target: SCN10A; (+) strand; PAM type: YTN; PAM sequence: TTT
  source 1..20: mol_type = other DNA
ctgtttgcctttctattgtt

SEQ ID NO: 75614 - DNA, 20 bp, synthetic construct
  misc_feature 1..20: note = Description of Artificial Sequence: Synthetic oligonucleotide
  misc_feature 1..20: note = Target: SCN10A; (+) strand; PAM type: YTN; PAM sequence: TTC
  source 1..20: mol_type = other DNA
tgtttgcctttctattgttt

SEQ ID NO: 75615 - DNA, 20 bp, synthetic construct
  misc_feature 1..20: note = Description of Artificial Sequence: Synthetic oligonucleotide
  misc_feature 1..20: note = Target: SCN10A; (+) strand; PAM type: YTN; PAM sequence: CTG
  source 1..20: mol_type = other DNA
tttgcctttctattgtttct

SEQ ID NO: 75616 - DNA, 20 bp, synthetic construct
  misc_feature 1..20: note = Description of Artificial Sequence: Synthetic oligonucleotide
  misc_feature 1..20: note = Target: SCN10A; (+) strand; PAM type: YTN; PAM sequence: TTT
  source 1..20: mol_type = other DNA
gcctttctattgtttctacc

SEQ ID NO: 75617 - DNA, 20 bp, synthetic construct
  misc_feature 1..20: note = Description of Artificial Sequence: Synthetic oligonucleotide
  misc_feature 1..20: note = Target: SCN10A; (+) strand; PAM type: YTN; PAM sequence: TTG
  source 1..20: mol_type = other DNA
cctttctattgtttctacca

SEQ ID NO: 75618 - DNA, 20 bp, synthetic construct
  misc_feature 1..20: note = Description of Artificial Sequence: Synthetic oligonucleotide
  misc_feature 1..20: note = Target: SCN10A; (+) strand; PAM type: YTN; PAM sequence: CTT
  source 1..20: mol_type = other DNA
tctattgtttctaccaaatt

SEQ ID NO: 75619 - DNA, 20 bp, synthetic construct
  misc_feature 1..20: note = Description of Artificial Sequence: Synthetic oligonucleotide
  misc_feature 1..20: note = Target: SCN10A; (+) strand; PAM type: YTN; PAM sequence: TTT
  source 1..20: mol_type = other DNA
ctattgtttctaccaaattg

SEQ ID NO: 75620 - DNA, 20 bp, synthetic construct
  misc_feature 1..20: note = Description of Artificial Sequence: Synthetic oligonucleotide
  misc_feature 1..20: note = Target: SCN10A; (+) strand; PAM type: YTN; PAM sequence: TTC
  source 1..20: mol_type = other DNA
tattgtttctaccaaattgt

SEQ ID NO: 75621 - DNA, 20 bp, synthetic construct
  misc_feature 1..20: note = Description of Artificial Sequence: Synthetic oligonucleotide
  misc_feature 1..20: note = Target: SCN10A; (+) strand; PAM type: YTN; PAM sequence: CTA
  source 1..20: mol_type = other DNA
ttgtttctaccaaattgtaa

SEQ ID NO: 75622 - DNA, 20 bp, synthetic construct
  misc_feature 1..20: note = Description of Artificial Sequence: Synthetic oligonucleotide
  misc_feature 1..20: note = Target: SCN10A; (+) strand; PAM type: YTN; PAM sequence: TTG
  source 1..20: mol_type = other DNA
tttctaccaaattgtaagct

SEQ ID NO: 75623 - DNA, 20 bp, synthetic construct
  misc_feature 1..20: note = Description of Artificial Sequence: Synthetic oligonucleotide
  misc_feature 1..20: note = Target: SCN10A; (+) strand; PAM type: YTN; PAM sequence: TTT
  source 1..20: mol_type = other DNA
ctaccaaattgtaagctcag

SEQ ID NO: 75624 - DNA, 20 bp, synthetic construct
  misc_feature 1..20: note = Description of Artificial Sequence: Synthetic oligonucleotide
  misc_feature 1..20: note = Target: SCN10A; (+) strand; PAM type: YTN; PAM sequence: TTC
  source 1..20: mol_type = other DNA
taccaaattgtaagctcagt

SEQ ID NO: 75625 - DNA, 20 bp, synthetic construct
  misc_feature 1..20: note = Description of Artificial Sequence: Synthetic oligonucleotide
  misc_feature 1..20: note = Target: SCN10A; (+) strand; PAM type: YTN; PAM sequence: CTA
  source 1..20: mol_type = other DNA
ccaaattgtaagctcagtga

SEQ ID NO: 75626 - DNA, 20 bp, synthetic construct
  misc_feature 1..20: note = Description of Artificial Sequence: Synthetic oligonucleotide
  misc_feature 1..20: note = Target: SCN10A; (+) strand; PAM type: YTN; PAM sequence: TTG
  source 1..20: mol_type = other DNA
taagctcagtgagagctgga

SEQ ID NO: 75627 - DNA, 20 bp, synthetic construct
  misc_feature 1..20: note = Description of Artificial Sequence: Synthetic oligonucleotide
  misc_feature 1..20: note = Target: SCN10A; (+) strand; PAM type: YTN; PAM sequence: CTC
  source 1..20: mol_type = other DNA
agtgagagctggactcacat

SEQ ID NO: 75628 - DNA, 20 bp, synthetic construct
  misc_feature 1..20: note = Description of Artificial Sequence: Synthetic oligonucleotide
  misc_feature 1..20: note = Target: SCN10A; (+) strand; PAM type: YTN; PAM sequence: CTG
  source 1..20: mol_type = other DNA
gactcacatctattttgttc

SEQ ID NO: 75629 - DNA, 20 bp, synthetic construct
  misc_feature 1..20: note = Description of Artificial Sequence: Synthetic oligonucleotide
  misc_feature 1..20: note = Target: SCN10A; (+) strand; PAM type: YTN; PAM sequence: CTC
  source 1..20: mol_type = other DNA
acatctattttgttcagcat

SEQ ID NO: 75630 - DNA, 20 bp, synthetic construct
  misc_feature 1..20: note = Description of Artificial Sequence: Synthetic oligonucleotide
  misc_feature 1..20: note = Target: SCN10A; (+) strand; PAM type: YTN; PAM sequence: CTA
  source 1..20: mol_type = other DNA
ttttgttcagcattgatttt

SEQ ID NO: 75631 - DNA, 20 bp, synthetic construct
  misc_feature 1..20: note = Description of Artificial Sequence: Synthetic oligonucleotide
  misc_feature 1..20: note = Target: SCN10A; (+) strand; PAM type: YTN; PAM sequence: TTT
  source 1..20: mol_type = other DNA
tgttcagcattgattttcca

SEQ ID NO: 75632 - DNA, 20 bp, synthetic construct
  misc_feature 1..20: note = Description of Artificial Sequence: Synthetic oligonucleotide
  misc_feature 1..20: note = Target: SCN10A; (+) strand; PAM type: YTN; PAM sequence: TTT
  source 1..20: mol_type = other DNA
gttcagcattgattttccag

SEQ ID NO: 75633 - DNA, 20 bp, synthetic construct
  misc_feature 1..20: note = Description of Artificial Sequence: Synthetic oligonucleotide
  misc_feature 1..20: note = Target: SCN10A; (+) strand; PAM type: YTN; PAM sequence: TTG
  source 1..20: mol_type = other DNA
ttcagcattgattttccaga

SEQ ID NO: 75634 - DNA, 20 bp, synthetic construct
  misc_feature 1..20: note = Description of Artificial Sequence: Synthetic oligonucleotide
  misc_feature 1..20: note = Target: SCN10A; (+) strand; PAM type: YTN; PAM sequence: TTC
  source 1..20: mol_type = other DNA
agcattgattttccagaacc

SEQ ID NO: 75635 - DNA, 20 bp, synthetic construct
  misc_feature 1..20: note = Description of Artificial Sequence: Synthetic oligonucleotide
  misc_feature 1..20: note = Target: SCN10A; (+) strand; PAM type: YTN; PAM sequence: TTG
  source 1..20: mol_type = other DNA
attttccagaacctagtaca

SEQ ID NO: 75636 - DNA, 20 bp, synthetic construct
  misc_feature 1..20: note = Description of Artificial Sequence: Synthetic oligonucleotide
  misc_feature 1..20: note = Target: SCN10A; (+) strand; PAM type: YTN; PAM sequence: TTT
  source 1..20: mol_type = other DNA
tccagaacctagtacagtgc

SEQ ID NO: 75637 - DNA, 20 bp, synthetic construct
  misc_feature 1..20: note = Description of Artificial Sequence: Synthetic oligonucleotide
  misc_feature 1..20: note = Target: SCN10A; (+) strand; PAM type: YTN; PAM sequence: TTT
  source 1..20: mol_type = other DNA
ccagaacctagtacagtgcc

SEQ ID NO: 75638 - DNA, 20 bp, synthetic construct
  misc_feature 1..20: note = Description of Artificial Sequence: Synthetic oligonucleotide
  misc_feature 1..20: note = Target: SCN10A; (+) strand; PAM type: YTN; PAM sequence: TTC
  source 1..20: mol_type = other DNA
cagaacctagtacagtgcct

SEQ ID NO: 75639 - DNA, 20 bp, synthetic construct
  misc_feature 1..20: note = Description of Artificial Sequence: Synthetic oligonucleotide
  misc_feature 1..20: note = Target: SCN10A; (+) strand; PAM type: YTN; PAM sequence: CTA
  source 1..20: mol_type = other DNA
gtacagtgcctggaactaac

SEQ ID NO: 75640 - DNA, 20 bp, synthetic construct
  misc_feature 1..20: note = Description of Artificial Sequence: Synthetic oligonucleotide
  misc_feature 1..20: note = Target: SCN10A; (+) strand; PAM type: YTN; PAM sequence: CTG
  source 1..20: mol_type = other DNA
gaactaactagatacagaat

SEQ ID NO: 75641 - DNA, 20 bp, synthetic construct
  misc_feature 1..20: note = Description of Artificial Sequence: Synthetic oligonucleotide
  misc_feature 1..20: note = Target: SCN10A; (+) strand; PAM type: YTN; PAM sequence: CTA
  source 1..20: mol_type = other DNA
actagatacagaatagatag

SEQ ID NO: 75642 - DNA, 20 bp, synthetic construct
  misc_feature 1..20: note = Description of Artificial Sequence: Synthetic oligonucleotide
  misc_feature 1..20: note = Target: SCN10A; (+) strand; PAM type: YTN; PAM sequence: CTA
  source 1..20: mol_type = other DNA
gatacagaatagatagttgt

SEQ ID NO: 75643 - DNA, 20 bp, synthetic construct
  misc_feature 1..20: note = Description of Artificial Sequence: Synthetic oligonucleotide
  misc_feature 1..20: note = Target: SCN10A; (+) strand; PAM type: YTN; PAM sequence: TTG
  source 1..20: mol_type = other DNA
ttgcatgaatagagataatg

SEQ ID NO: 75644 - DNA, 20 bp, synthetic construct
  misc_feature 1..20: note = Description of Artificial Sequence: Synthetic oligonucleotide
  misc_feature 1..20: note = Target: SCN10A; (+) strand; PAM type: YTN; PAM sequence: TTG
  source 1..20: mol_type = other DNA
catgaatagagataatggcg

SEQ ID NO: 75645 - DNA, 20 bp, synthetic construct
  misc_feature 1..20: note = Description of Artificial Sequence: Synthetic oligonucleotide
  misc_feature 1..20: note = Target: SCN10A; (+) strand; PAM type: YTN; PAM sequence: CTT
  source 1..20: mol_type = other DNA
aatagctgaaaaactaaaga

SEQ ID NO: 75646 - DNA, 20 bp, synthetic construct
  misc_feature 1..20: note = Description of Artificial Sequence: Synthetic oligonucleotide
  misc_feature 1..20: note = Target: SCN10A; (+) strand; PAM type: YTN; PAM sequence: TTA
  source 1..20: mol_type = other DNA
atagctgaaaaactaaagaa

SEQ ID NO: 75647 - DNA, 20 bp, synthetic construct
  misc_feature 1..20: note = Description of Artificial Sequence: Synthetic oligonucleotide
  misc_feature 1..20: note = Target: SCN10A; (+) strand; PAM type: YTN; PAM sequence: CTG
  source 1..20: mol_type = other DNA
aaaaactaaagaacattttg

SEQ ID NO: 75648 - DNA, 20 bp, synthetic construct
  misc_feature 1..20: note = Description of Artificial Sequence: Synthetic oligonucleotide
  misc_feature 1..20: note = Target: SCN10A; (+) strand; PAM type: YTN; PAM sequence: CTA
  source 1..20: mol_type = other DNA
aagaacattttgttcagaaa

SEQ ID NO: 75649 - DNA, 20 bp, synthetic construct
  misc_feature 1..20: note = Description of Artificial Sequence: Synthetic oligonucleotide
  misc_feature 1..20: note = Target: SCN10A; (+) strand; PAM type: YTN; PAM sequence: TTT
  source 1..20: mol_type = other DNA
tgttcagaaaaatgcagcaa

SEQ ID NO: 75650 - DNA, 20 bp, synthetic construct
  misc_feature 1..20: note = Description of Artificial Sequence: Synthetic oligonucleotide
  misc_feature 1..20: note = Target: SCN10A; (+) strand; PAM type: YTN; PAM sequence: TTT
  source 1..20: mol_type = other DNA
gttcagaaaaatgcagcaaa

SEQ ID NO: 75651 - DNA, 20 bp, synthetic construct
  misc_feature 1..20: note = Description of Artificial Sequence: Synthetic oligonucleotide
  misc_feature 1..20: note = Target: SCN10A; (+) strand; PAM type: YTN; PAM sequence: TTG
  source 1..20: mol_type = other DNA
ttcagaaaaatgcagcaaaa

SEQ ID NO: 75652 - DNA, 20 bp, synthetic construct
  misc_feature 1..20: note = Description of Artificial Sequence: Synthetic oligonucleotide
  misc_feature 1..20: note = Target: SCN10A; (+) strand; PAM type: YTN; PAM sequence: TTC
  source 1..20: mol_type = other DNA
agaaaaatgcagcaaaaatc

SEQ ID NO: 75653 - DNA, 20 bp, synthetic construct
  misc_feature 1..20: note = Description of Artificial Sequence: Synthetic oligonucleotide
  misc_feature 1..20: note = Target: SCN10A; (+) strand; PAM type: YTN; PAM sequence: TTA
  source 1..20: mol_type = other DNA
ttgagtctattgacatttta

SEQ ID NO: 75654 - DNA, 20 bp, synthetic construct
  misc_feature 1..20: note = Description of Artificial Sequence: Synthetic oligonucleotide
  misc_feature 1..20: note = Target: SCN10A; (+) strand; PAM type: YTN; PAM sequence: TTG
  source 1..20: mol_type = other DNA
agtctattgacattttaaag

SEQ ID NO: 75655 - DNA, 20 bp, synthetic construct
  misc_feature 1..20: note = Description of Artificial Sequence: Synthetic oligonucleotide
  misc_feature 1..20: note = Target: SCN10A; (+) strand; PAM type: YTN; PAM sequence: CTA
  source 1..20: mol_type = other DNA
ttgacattttaaagctcaca

SEQ ID NO: 75656 - DNA, 20 bp, synthetic construct
  misc_feature 1..20: note = Description of Artificial Sequence: Synthetic oligonucleotide
  misc_feature 1..20: note = Target: SCN10A; (+) strand; PAM type: YTN; PAM sequence: TTG
  source 1..20: mol_type = other DNA
acattttaaagctcacacac

SEQ ID NO: 75657 - DNA, 20 bp, synthetic construct
  misc_feature 1..20: note = Description of Artificial Sequence: Synthetic oligonucleotide
  misc_feature 1..20: note = Target: SCN10A; (+) strand; PAM type: YTN; PAM sequence: TTT
  source 1..20: mol_type = other DNA
taaagctcacacaccccaaa

SEQ ID NO: 75658 - DNA, 20 bp, synthetic construct
  misc_feature 1..20: note = Description of Artificial Sequence: Synthetic oligonucleotide
  misc_feature 1..20: note = Target: SCN10A; (+) strand; PAM type: YTN; PAM sequence: TTT
  source 1..20: mol_type = other DNA
aaagctcacacaccccaaag

SEQ ID NO: 75659 - DNA, 20 bp, synthetic construct
  misc_feature 1..20: note = Description of Artificial Sequence: Synthetic oligonucleotide
  misc_feature 1..20: note = Target: SCN10A; (+) strand; PAM type: YTN; PAM sequence: TTA
  source 1..20: mol_type = other DNA
aagctcacacaccccaaagt

SEQ ID NO: 75660 - DNA, 20 bp, synthetic construct
  misc_feature 1..20: note = Description of Artificial Sequence: Synthetic oligonucleotide
  misc_feature 1..20: note = Target: SCN10A; (+) strand; PAM type: YTN; PAM sequence: CTC
  source 1..20: mol_type = other DNA
acacaccccaaagtcaagca

SEQ ID NO: 75661 - DNA, 20 bp, synthetic construct
  misc_feature 1..20: note = Description of Artificial Sequence: Synthetic oligonucleotide
  misc_feature 1..20: note = Target: SCN10A; (+) strand; PAM type: YTN; PAM sequence: CTT
  source 1..20: mol_type = other DNA
aaatcaaatacccctatgat

SEQ ID NO: 75662 - DNA, 20 bp, synthetic construct
  misc_feature 1..20: note = Description of Artificial Sequence: Synthetic oligonucleotide
  misc_feature 1..20: note = Target: SCN10A; (+) strand; PAM type: YTN; PAM sequence: TTA
  source 1..20: mol_type = other DNA
aatcaaatacccctatgatg

SEQ ID NO: 75663 - DNA, 20 bp, synthetic construct
  misc_feature 1..20: note = Description of Artificial Sequence: Synthetic oligonucleotide
  misc_feature 1..20: note = Target: SCN10A; (+) strand; PAM type: YTN; PAM sequence: CTA
  source 1..20: mol_type = other DNA
tgatggagatcctgcttgct

SEQ ID NO: 75664 - DNA, 20 bp, synthetic construct
  misc_feature 1..20: note = Description of Artificial Sequence: Synthetic oligonucleotide
  misc_feature 1..20: note = Target: SCN10A; (+) strand; PAM type: YTN; PAM sequence: CTG
  source 1..20: mol_type = other DNA
cttgctcccaccatacctag

SEQ ID NO: 75665 - DNA, 20 bp, synthetic construct
  misc_feature 1..20: note = Description of Artificial Sequence: Synthetic oligonucleotide
  misc_feature 1..20: note = Target: SCN10A; (+) strand; PAM type: YTN; PAM sequence: CTT
  source 1..20: mol_type = other DNA
gctcccaccatacctagagg

SEQ ID NO: 75666 - DNA, 20 bp, synthetic construct
  misc_feature 1..20: note = Description of Artificial Sequence: Synthetic oligonucleotide
  misc_feature 1..20: note = Target: SCN10A; (+) strand; PAM type: YTN; PAM sequence: TTG
  source 1..20: mol_type = other DNA
ctcccaccatacctagaggt

SEQ ID NO: 75667 - DNA, 20 bp, synthetic construct
  misc_feature 1..20: note = Description of Artificial Sequence: Synthetic oligonucleotide
  misc_feature 1..20: note = Target: SCN10A; (+) strand; PAM type: YTN; PAM sequence: CTC
  source 1..20: mol_type = other DNA
ccaccatacctagaggtatt

SEQ ID NO: 75668 - DNA, 20 bp, synthetic construct
  misc_feature 1..20: note = Description of Artificial Sequence: Synthetic oligonucleotide
  misc_feature 1..20: note = Target: SCN10A; (+) strand; PAM type: YTN; PAM sequence: CTA
  source 1..20: mol_type = other DNA
gaggtatttcttgaatccaa

SEQ ID NO: 75669 - DNA, 20 bp, synthetic construct
  misc_feature 1..20: note = Description of Artificial Sequence: Synthetic oligonucleotide
  misc_feature 1..20: note = Target: SCN10A; (+) strand; PAM type: YTN; PAM sequence: TTT
  source 1..20: mol_type = other DNA
cttgaatccaatacctctgt

SEQ ID NO: 75670 - DNA, 20 bp, synthetic construct
  misc_feature 1..20: note = Description of Artificial Sequence: Synthetic oligonucleotide
  misc_feature 1..20: note = Target: SCN10A; (+) strand; PAM type: YTN; PAM sequence: TTC
  source 1..20: mol_type = other DNA
ttgaatccaatacctctgtg

SEQ ID NO: 75671 - DNA, 20 bp, synthetic construct
  misc_feature 1..20: note = Description of Artificial Sequence: Synthetic oligonucleotide
  misc_feature 1..20: note = Target: SCN10A; (+) strand; PAM type: YTN; PAM sequence: CTT
  source 1..20: mol_type = other DNA
gaatccaatacctctgtgat

SEQ ID NO: 75672 - DNA, 20 bp, synthetic construct
  misc_feature 1..20: note = Description of Artificial Sequence: Synthetic oligonucleotide
  misc_feature 1..20: note = Target: SCN10A; (+) strand; PAM type: YTN; PAM sequence: TTG
  source 1..20: mol_type = other DNA
aatccaatacctctgtgata

SEQ ID NO: 75673 - DNA, 20 bp, synthetic construct
  misc_feature 1..20: note = Description of Artificial Sequence: Synthetic oligonucleotide
  misc_feature 1..20: note = Target: SCN10A; (+) strand; PAM type: YTN; PAM sequence: CTC
  source 1..20: mol_type = other DNA
tgtgatatagacactgctta

SEQ ID NO: 75674 - DNA, 20 bp, synthetic construct
  misc_feature 1..20: note = Description of Artificial Sequence: Synthetic oligonucleotide
  misc_feature 1..20: note = Target: SCN10A; (+) strand; PAM type: YTN; PAM sequence: CTG
  source 1..20: mol_type = other DNA
tgatatagacactgcttatt

SEQ ID NO: 75675 - DNA, 20 bp, synthetic construct
  misc_feature 1..20: note = Description of Artificial Sequence: Synthetic oligonucleotide
  misc_feature 1..20: note = Target: SCN10A; (+) strand; PAM type: YTN; PAM sequence: CTG
  source 1..20: mol_type = other DNA
cttattgtcaccagccctag

SEQ ID NO: 75676 - DNA, 20 bp, synthetic construct
  misc_feature 1..20: note = Description of Artificial Sequence: Synthetic oligonucleotide
  misc_feature 1..20: note = Target: SCN10A; (+) strand; PAM type: YTN; PAM sequence: CTT
  source 1..20: mol_type = other DNA
attgtcaccagccctagagg

SEQ ID NO: 75677 - DNA, 20 bp, synthetic construct
  misc_feature 1..20: note = Description of Artificial Sequence: Synthetic oligonucleotide
  misc_feature 1..20: note = Target: SCN10A; (+) strand; PAM type: YTN; PAM sequence: TTA
  source 1..20: mol_type = other DNA
ttgtcaccagccctagaggc

SEQ ID NO: 75678 - DNA, 20 bp, synthetic construct
  misc_feature 1..20: note = Description of Artificial Sequence: Synthetic oligonucleotide
  misc_feature 1..20: note = Target: SCN10A; (+) strand; PAM type: YTN; PAM sequence: TTG
  source 1..20: mol_type = other DNA
tcaccagccctagaggcagc

SEQ ID NO: 75679 - DNA, 20 bp, synthetic construct
  misc_feature 1..20: note = Description of Artificial Sequence: Synthetic oligonucleotide
  misc_feature 1..20: note = Target: SCN10A; (+) strand; PAM type: YTN; PAM sequence: CTA
  source 1..20: mol_type = other DNA
gaggcagctctggtacccaa

SEQ ID NO: 75680 - DNA, 20 bp, synthetic construct
  misc_feature 1..20: note = Description of Artificial Sequence: Synthetic oligonucleotide
  misc_feature 1..20: note = Target: SCN10A; (+) strand; PAM type: YTN; PAM sequence: CTC
  source 1..20: mol_type = other DNA
tggtacccaatacccatatg

SEQ ID NO: 75681 - DNA, 20 bp, synthetic construct
  misc_feature 1..20: note = Description of Artificial Sequence: Synthetic oligonucleotide
  misc_feature 1..20: note = Target: SCN10A; (+) strand; PAM type: YTN; PAM sequence: CTG
  source 1..20: mol_type = other DNA
gtacccaatacccatatgta

SEQ ID NO: 75682 - DNA, 20 bp, synthetic construct
  misc_feature 1..20: note = Description of Artificial Sequence: Synthetic oligonucleotide
  misc_feature 1..20: note = Target: SCN10A; (+) strand; PAM type: YTN; PAM sequence: CTC
  source 1..20: mol_type = other DNA
tgctggttgtcaccagtcct

SEQ ID NO: 75683 - DNA, 20 bp, synthetic construct
  misc_feature 1..20: note = Description of Artificial Sequence: Synthetic oligonucleotide
  misc_feature 1..20: note = Target: SCN10A; (+) strand; PAM type: YTN; PAM sequence: CTG
  source 1..20: mol_type = other DNA
ctggttgtcaccagtccttc

SEQ ID NO: 75684 - DNA, 20 bp, synthetic construct
  misc_feature 1..20: note = Description of Artificial Sequence: Synthetic oligonucleotide
  misc_feature 1..20: note = Target: SCN10A; (+) strand; PAM type: YTN; PAM sequence: CTG
  source 1..20: mol_type = other DNA
gttgtcaccagtccttccat

SEQ ID NO: 75685 - DNA, 20 bp, synthetic construct
  misc_feature 1..20: note = Description of Artificial Sequence: Synthetic oligonucleotide
  misc_feature 1..20: note = Target: SCN10A; (+) strand; PAM type: YTN; PAM sequence: TTG
  source 1..20: mol_type = other DNA
tcaccagtccttccatgcat

SEQ ID NO: 75686 - DNA, 20 bp, synthetic construct
  misc_feature 1..20: note = Description of Artificial Sequence: Synthetic oligonucleotide
  misc_feature 1..20: note = Target: SCN10A; (+) strand; PAM type: YTN; PAM sequence: CTT
  source 1..20: mol_type = other DNA
ccatgcattgaagtcctggg

SEQ ID NO: 75687 - DNA, 20 bp, synthetic construct
  misc_feature 1..20: note = Description of Artificial Sequence: Synthetic oligonucleotide
  misc_feature 1..20: note = Target: SCN10A; (+) strand; PAM type: YTN; PAM sequence: TTC
  source 1..20: mol_type = other DNA
catgcattgaagtcctggga

SEQ ID NO: 75688 - DNA, 20 bp, synthetic construct
  misc_feature 1..20: note = Description of Artificial Sequence: Synthetic oligonucleotide
  misc_feature 1..20: note = Target: SCN10A; (+) strand; PAM type: YTN; PAM sequence: TTG
  source 1..20: mol_type = other DNA
aagtcctgggaggagcactc

SEQ ID NO: 75689 - DNA, 20 bp, synthetic construct
  misc_feature 1..20: note = Description of Artificial Sequence: Synthetic oligonucleotide
  misc_feature 1..20: note = Target: SCN10A; (+) strand; PAM type: YTN; PAM sequence: CTG
  source 1..20: mol_type = other DNA
ggaggagcactcactgctct

SEQ ID NO: 75690 - DNA, 20 bp, synthetic construct
  misc_feature 1..20: note = Description of Artificial Sequence: Synthetic oligonucleotide
  misc_feature 1..20: note = Target: SCN10A; (+) strand; PAM type: YTN; PAM sequence: CTC
  source 1..20: mol_type = other DNA
actgctctgacaccattcct

SEQ ID NO: 75691 - DNA, 20 bp, synthetic construct
  misc_feature 1..20: note = Description of Artificial Sequence: Synthetic oligonucleotide
  misc_feature 1..20: note = Target: SCN10A; (+) strand; PAM type: YTN; PAM sequence: CTG
  source 1..20: mol_type = other DNA
ctctgacaccattcctcttc

SEQ ID NO: 75692 - DNA, 20 bp, synthetic construct
  misc_feature 1..20: note = Description of Artificial Sequence: Synthetic oligonucleotide
  misc_feature 1..20: note = Target: SCN10A; (+) strand; PAM type: YTN; PAM sequence: CTC
  source 1..20: mol_type = other DNA
tgacaccattcctcttcctt

SEQ ID NO: 75693 - DNA, 20 bp, synthetic construct
  misc_feature 1..20: note = Description of Artificial Sequence: Synthetic oligonucleotide
  misc_feature 1..20: note = Target: SCN10A; (+) strand; PAM type: YTN; PAM sequence: CTG
  source 1..20: mol_type = other DNA
acaccattcctcttccttaa

SEQ ID NO: 75694 - DNA, 20 bp, synthetic construct
  misc_feature 1..20: note = Description of Artificial Sequence: Synthetic oligonucleotide
  misc_feature 1..20: note = Target: SCN10A; (+) strand; PAM type: YTN; PAM sequence: TTC
  source 1..20: mol_type = other DNA
ctcttccttaatgtcctcca

SEQ ID NO: 75695 - DNA, 20 bp, synthetic construct
  misc_feature 1..20: note = Description of Artificial Sequence: Synthetic oligonucleotide
  misc_feature 1..20: note = Target: SCN10A; (+) strand; PAM type: YTN; PAM sequence: CTC
  source 1..20: mol_type = other DNA
ttccttaatgtcctccatta

SEQ ID NO: 75696 - DNA, 20 bp, synthetic construct
  misc_feature 1..20: note = Description of Artificial Sequence: Synthetic oligonucleotide
  misc_feature 1..20: note = Target: SCN10A; (+) strand; PAM type: YTN; PAM sequence: CTT
  source 1..20: mol_type = other DNA
ccttaatgtcctccattact

SEQ ID NO: 75697 - DNA, 20 bp, synthetic construct
  misc_feature 1..20: note = Description of Artificial Sequence: Synthetic oligonucleotide
  misc_feature 1..20: note = Target: SCN10A; (+) strand; PAM type: YTN; PAM sequence: TTC
  source 1..20: mol_type = other DNA
cttaatgtcctccattactt

SEQ ID NO: 75698 - DNA, 20 bp, synthetic construct
  misc_feature 1..20: note = Description of Artificial Sequence: Synthetic oligonucleotide
  misc_feature 1..20: note = Target: SCN10A; (+) strand; PAM type: YTN; PAM sequence: CTT
  source 1..20: mol_type = other DNA
aatgtcctccattactttct

SEQ ID NO: 75699 - DNA, 20 bp, synthetic construct
  misc_feature 1..20: note = Description of Artificial Sequence: Synthetic oligonucleotide
  misc_feature 1..20: note = Target: SCN10A; (+) strand; PAM type: YTN; PAM sequence: TTA
  source 1..20: mol_type = other DNA
atgtcctccattactttctt

SEQ ID NO: 75700 - DNA, 20 bp, synthetic construct
  misc_feature 1..20: note = Description of Artificial Sequence: Synthetic oligonucleotide
  misc_feature 1..20: note = Target: SCN10A; (+) strand; PAM type: YTN; PAM sequence: CTC
  source 1..20: mol_type = other DNA
cattactttcttctgagagc

SEQ ID NO: 75701 - DNA, 20 bp, synthetic construct
  misc_feature 1..20: note = Description of Artificial Sequence: Synthetic oligonucleotide
  misc_feature 1..20: note = Target: SCN10A; (+) strand; PAM type: YTN; PAM sequence: TTA
  source 1..20: mol_type = other DNA
ctttcttctgagagctttcc

SEQ ID NO: 75702 - DNA, 20 bp, synthetic construct
  misc_feature 1..20: note = Description of Artificial Sequence: Synthetic oligonucleotide
  misc_feature 1..20: note = Target: SCN10A; (+) strand; PAM type: YTN; PAM sequence: CTT
  source 1..20: mol_type = other DNA
tcttctgagagctttccctc

SEQ ID NO: 75703 - DNA, 20 bp, synthetic construct
  misc_feature 1..20: note = Description of Artificial Sequence: Synthetic oligonucleotide
  misc_feature 1..20: note = Target: SCN10A; (+) strand; PAM type: YTN; PAM sequence: TTT
  source 1..20: mol_type = other DNA
cttctgagagctttccctca

SEQ ID NO: 75704 - DNA, 20 bp, synthetic construct
  misc_feature 1..20: note = Description of Artificial Sequence: Synthetic oligonucleotide
  misc_feature 1..20: note = Target: SCN10A; (+) strand; PAM type: YTN; PAM sequence: TTC
  source 1..20: mol_type = other DNA
ttctgagagctttccctcac

SEQ ID NO: 75705 - DNA, 20 bp, synthetic construct
  misc_feature 1..20: note = Description of Artificial Sequence: Synthetic oligonucleotide
  misc_feature 1..20: note = Target: SCN10A; (+) strand; PAM type: YTN; PAM sequence: CTT
  source 1..20: mol_type = other DNA
ctgagagctttccctcaccc

SEQ ID NO: 75706 - DNA, 20 bp, synthetic construct
  misc_feature 1..20: note = Description of Artificial Sequence: Synthetic oligonucleotide
  misc_feature 1..20: note = Target: SCN10A; (+) strand; PAM type: YTN; PAM sequence: TTC
  source 1..20: mol_type = other DNA
tgagagctttccctcaccct

SEQ ID NO: 75707 - DNA, 20 bp, synthetic construct
  misc_feature 1..20: note = Description of Artificial Sequence: Synthetic oligonucleotide
  misc_feature 1..20: note = Target: SCN10A; (+) strand; PAM type: YTN; PAM sequence: CTG
  source 1..20: mol_type = other DNA
agagctttccctcaccctct

SEQ ID NO: 75708 - DNA, 20 bp, synthetic construct
  misc_feature 1..20: note = Description of Artificial Sequence: Synthetic oligonucleotide
  misc_feature 1..20: note = Target: SCN10A; (+) strand; PAM type: YTN; PAM sequence: CTT
  source 1..20: mol_type = other DNA
tccctcaccctcttcctctc

SEQ ID NO: 75709 - DNA, 20 bp, synthetic construct
  misc_feature 1..20: note = Description of Artificial Sequence: Synthetic oligonucleotide
  misc_feature 1..20: note = Target: SCN10A; (+) strand; PAM type: YTN; PAM sequence: TTT
  source 1..20: mol_type = other DNA
ccctcaccctcttcctctcc

SEQ ID NO: 75710 - DNA, 20 bp, synthetic construct
  misc_feature 1..20: note = Description of Artificial Sequence: Synthetic oligonucleotide
  misc_feature 1..20: note = Target: SCN10A; (+) strand; PAM type: YTN; PAM sequence: TTC
  source 1..20: mol_type = other DNA
cctcaccctcttcctctcct

SEQ ID NO: 75711 - DNA, 20 bp, synthetic construct
  misc_feature 1..20: note = Description of Artificial Sequence: Synthetic oligonucleotide
  misc_feature 1..20: note = Target: SCN10A; (+) strand; PAM type: YTN; PAM sequence: CTC
  source 1..20: mol_type = other DNA
accctcttcctctcctcctg

SEQ ID NO: 75712 - DNA, 20 bp, synthetic construct
  misc_feature 1..20: note = Description of Artificial Sequence: Synthetic oligonucleotide
  misc_feature 1..20: note = Target: SCN10A; (+) strand; PAM type: YTN; PAM sequence: CTC
  source 1..20: mol_type = other DNA
ttcctctcctcctgcctatt

SEQ ID NO: 75713 - DNA, 20 bp, synthetic construct
  misc_feature 1..20: note = Description of Artificial Sequence: Synthetic oligonucleotide
  misc_feature 1..20: note = Target: SCN10A; (+) strand; PAM type: YTN; PAM sequence: CTT
  source 1..20: mol_type = other DNA
cctctcctcctgcctatttg

SEQ ID NO: 75714 - DNA, 20 bp, synthetic construct
  misc_feature 1..20: note = Description of Artificial Sequence: Synthetic oligonucleotide
  misc_feature 1..20: note = Target: SCN10A; (+) strand; PAM type: YTN; PAM sequence: TTC
  source 1..20: mol_type = other DNA
ctctcctcctgcctatttgt

SEQ ID NO: 75715 - DNA, 20 bp, synthetic construct
  misc_feature 1..20: note = Description of Artificial Sequence: Synthetic oligonucleotide
  misc_feature 1..20: note = Target: SCN10A; (+) strand; PAM type: YTN; PAM sequence: CTC
  source 1..20: mol_type = other DNA
tcctcctgcctatttgtagt

SEQ ID NO: 75716 - DNA, 20 bp, synthetic construct
  misc_feature 1..20: note = Description of Artificial Sequence: Synthetic oligonucleotide
  misc_feature 1..20: note = Target: SCN10A; (+) strand; PAM type: YTN; PAM sequence: CTC
  source 1..20: mol_type = other DNA
ctcctgcctatttgtagttg

SEQ ID NO: 75717 - DNA, 20 bp, synthetic construct
  misc_feature 1..20: note = Description of Artificial Sequence: Synthetic oligonucleotide
  misc_feature 1..20: note = Target: SCN10A; (+) strand; PAM type: YTN; PAM sequence: CTC
  source 1..20: mol_type = other DNA
ctgcctatttgtagttgatc

SEQ ID NO: 75718 - DNA, 20 bp, synthetic construct
  misc_feature 1..20: note = Description of Artificial Sequence: Synthetic oligonucleotide
  misc_feature 1..20: note = Target: SCN10A; (+) strand; PAM type: YTN; PAM sequence: CTG
  source 1..20: mol_type = other DNA
cctatttgtagttgatctgt

SEQ ID NO: 75719 - DNA, 20 bp, synthetic construct
  misc_feature 1..20: note = Description of Artificial Sequence: Synthetic oligonucleotide
  misc_feature 1..20: note = Target: SCN10A; (+) strand; PAM type: YTN; PAM sequence: CTA
  source 1..20: mol_type = other DNA
tttgtagttgatctgtttct

SEQ ID NO: 75720 - DNA, 20 bp, synthetic construct
  misc_feature 1..20: note = Description of Artificial Sequence: Synthetic oligonucleotide
  misc_feature 1..20: note = Target: SCN10A; (+) strand; PAM type: YTN; PAM sequence: TTT
  source 1..20: mol_type = other DNA
gtagttgatctgtttcttac

SEQ ID NO: 75721 - DNA, 20 bp, synthetic construct
  misc_feature 1..20: note = Description of Artificial Sequence: Synthetic oligonucleotide
  misc_feature 1..20: note = Target: SCN10A; (+) strand; PAM type: YTN; PAM sequence: TTG
  source 1..20: mol_type = other DNA
tagttgatctgtttcttacg

SEQ ID NO: 75722 - DNA, 20 bp, synthetic construct
  misc_feature 1..20: note = Description of Artificial Sequence: Synthetic oligonucleotide
  misc_feature 1..20: note = Target: SCN10A; (+) strand; PAM type: YTN; PAM sequence: TTG
  source 1..20: mol_type = other DNA
atctgtttcttacggaactt

SEQ ID NO: 75723 - DNA, 20 bp, synthetic construct
  misc_feature 1..20: note = Description of Artificial Sequence: Synthetic oligonucleotide
  misc_feature 1..20: note = Target: SCN10A; (+) strand; PAM type: YTN; PAM sequence: CTG
  source 1..20: mol_type = other DNA
tttcttacggaacttttcaa

SEQ ID NO: 75724 - DNA, 20 bp, synthetic construct
  misc_feature 1..20: note = Description of Artificial Sequence: Synthetic oligonucleotide
  misc_feature 1..20: note = Target: SCN10A; (+) strand; PAM type: YTN; PAM sequence: TTT
  source 1..20: mol_type = other DNA
cttacggaacttttcaaagt

SEQ ID NO: 75725 - DNA, 20 bp, synthetic construct
  misc_feature 1..20: note = Description of Artificial Sequence: Synthetic oligonucleotide
  misc_feature 1..20: note = Target: SCN10A; (+) strand; PAM type: YTN; PAM sequence: TTC
  source 1..20: mol_type = other DNA
ttacggaacttttcaaagtc

SEQ ID NO: 75726 - DNA, 20 bp, synthetic construct
  misc_feature 1..20: note = Description of Artificial Sequence: Synthetic oligonucleotide
  misc_feature 1..20: note = Target: SCN10A; (+) strand; PAM type: YTN; PAM sequence: CTT
  source 1..20: mol_type = other DNA
acggaacttttcaaagtcaa

SEQ ID NO: 75727 - DNA, 20 bp, synthetic construct
  misc_feature 1..20: note = Description of Artificial Sequence: Synthetic oligonucleotide
  misc_feature 1..20: note = Target: SCN10A; (+) strand; PAM type: YTN; PAM sequence: TTA
  source 1..20: mol_type = other DNA
cggaacttttcaaagtcaac

SEQ ID NO: 75728 - DNA, 20 bp, synthetic construct
  misc_feature 1..20: note = Description of Artificial Sequence: Synthetic oligonucleotide
  misc_feature 1..20: note = Target: SCN10A; (+) strand; PAM type: YTN; PAM sequence: CTT
  source 1..20: mol_type = other DNA
ttcaaagtcaacctacatta

SEQ ID NO: 75729 - DNA, 20 bp, synthetic construct
  misc_feature 1..20: note = Description of Artificial Sequence: Synthetic oligonucleotide
  misc_feature 1..20: note = Target: SCN10A; (+) strand; PAM type: YTN; PAM sequence: TTT
  source 1..20: mol_type = other DNA
tcaaagtcaacctacattac

SEQ ID NO: 75730 - DNA, 20 bp, synthetic construct
  misc_feature 1..20: note = Description of Artificial Sequence: Synthetic oligonucleotide
  misc_feature 1..20: note = Target: SCN10A; (+) strand; PAM type: YTN; PAM sequence: TTT
  source 1..20: mol_type = other DNA
caaagtcaacctacattaca

SEQ ID NO: 75731 - DNA, 20 bp, synthetic construct
  misc_feature 1..20: note = Description of Artificial Sequence: Synthetic oligonucleotide
  misc_feature 1..20: note = Target: SCN10A; (+) strand; PAM type: YTN; PAM sequence: TTC
  source 1..20: mol_type = other DNA
aaagtcaacctacattacat

SEQ ID NO: 75732 - DNA, 20 bp, synthetic construct
  misc_feature 1..20: note = Description of Artificial Sequence: Synthetic oligonucleotide
  misc_feature 1..20: note = Target: SCN10A; (+) strand; PAM type: YTN; PAM sequence: CTA
  source 1..20: mol_type = other DNA
cattacataattgaacatct

SEQ ID NO: 75733 - DNA, 20 bp, synthetic construct
  misc_feature 1..20: note = Description of Artificial Sequence: Synthetic oligonucleotide
  misc_feature 1..20: note = Target: SCN10A; (+) strand; PAM type: YTN; PAM sequence: TTA
  source 1..20: mol_type = other DNA
cataattgaacatctgtctt

SEQ ID NO: 75734 - DNA, 20 bp, synthetic construct
  misc_feature 1..20: note = Description of Artificial Sequence: Synthetic oligonucleotide
  misc_feature 1..20: note = Target: SCN10A; (+) strand; PAM type: YTN; PAM sequence: TTG
  source 1..20: mol_type = other DNA
aacatctgtcttctattttc

SEQ ID NO: 75735 - DNA, 20 bp, synthetic construct
  misc_feature 1..20: note = Description of Artificial Sequence: Synthetic oligonucleotide
  misc_feature 1..20: note = Target: SCN10A; (+) strand; PAM type: YTN; PAM sequence: CTG
  source 1..20: mol_type = other DNA
tcttctattttcttctaact

SEQ ID NO: 75736 - DNA, 20 bp, synthetic construct
  misc_feature 1..20: note = Description of Artificial Sequence: Synthetic oligonucleotide
  misc_feature 1..20: note = Target: SCN10A; (+) strand; PAM type: YTN; PAM sequence: CTT
  source 1..20: mol_type = other DNA
ctattttcttctaacttaga

SEQ ID NO: 75737 - DNA, 20 bp, synthetic construct
  misc_feature 1..20: note = Description of Artificial Sequence: Synthetic oligonucleotide
  misc_feature 1..20: note = Target: SCN10A; (+) strand; PAM type: YTN; PAM sequence: TTC
  source 1..20: mol_type = other DNA
tattttcttctaacttagaa

SEQ ID NO: 75738 - DNA, 20 bp, synthetic construct
  misc_feature 1..20: note = Description of Artificial Sequence: Synthetic oligonucleotide
  misc_feature 1..20: note = Target: SCN10A; (+) strand; PAM type: YTN; PAM sequence: CTA
  source 1..20: mol_type = other DNA
ttttcttctaacttagaagt

SEQ ID NO: 75739 - DNA, 20 bp, synthetic construct
  misc_feature 1..20: note = Description of Artificial Sequence: Synthetic oligonucleotide
  misc_feature 1..20: note = Target: SCN10A; (+) strand; PAM type: YTN; PAM sequence: TTT
  source 1..20: mol_type = other DNA
tcttctaacttagaagttct

SEQ ID NO: 75740 - DNA, 20 bp, synthetic construct
  misc_feature 1..20: note = Description of Artificial Sequence: Synthetic oligonucleotide
  misc_feature 1..20: note = Target: SCN10A; (+) strand; PAM type: YTN; PAM sequence: TTT
  source 1..20: mol_type = other DNA
cttctaacttagaagttcta

SEQ ID NO: 75741 - DNA, 20 bp, synthetic construct
  misc_feature 1..20: note = Description of Artificial Sequence: Synthetic oligonucleotide
  misc_feature 1..20: note = Target: SCN10A; (+) strand; PAM type: YTN; PAM sequence: TTC
  source 1..20: mol_type = other DNA
ttctaacttagaagttctat

SEQ ID NO: 75742 - DNA, 20 bp, synthetic construct
  misc_feature 1..20: note = Description of Artificial Sequence: Synthetic oligonucleotide
  misc_feature 1..20: note = Target: SCN10A; (+) strand; PAM type: YTN; PAM sequence: CTT
  source 1..20: mol_type = other DNA
ctaacttagaagttctatgt

SEQ ID NO: 75743 - DNA, 20 bp, synthetic construct
  misc_feature 1..20: note = Description of Artificial Sequence: Synthetic oligonucleotide
  misc_feature 1..20: note = Target: SCN10A; (+) strand; PAM type: YTN; PAM sequence: TTC
  source 1..20: mol_type = other DNA
taacttagaagttctatgtg

SEQ ID NO: 75744 - DNA, 20 bp, synthetic construct
  misc_feature 1..20: note = Description of Artificial Sequence: Synthetic oligonucleotide
  misc_feature 1..20: note = Target: SCN10A; (+) strand; PAM type: YTN; PAM sequence: CTA
  source 1..20: mol_type = other DNA
acttagaagttctatgtgtt

SEQ ID NO: 75745 - DNA, 20 bp, synthetic construct
  misc_feature 1..20: note = Description of Artificial Sequence: Synthetic oligonucleotide
  misc_feature 1..20: note = Target: SCN10A; (+) strand; PAM type: YTN; PAM sequence: CTT
  source 1..20: mol_type = other DNA
agaagttctatgtgttgtgt

SEQ ID NO: 75746 - DNA, 20 bp, synthetic construct
  misc_feature 1..20: note = Description of Artificial Sequence: Synthetic oligonucleotide
  misc_feature 1..20: note = Target: SCN10A; (+) strand; PAM type: YTN; PAM sequence: TTA
  source 1..20: mol_type = other DNA
gaagttctatgtgttgtgtg

SEQ ID NO: 75747 - DNA, 20 bp, synthetic construct
  misc_feature 1..20: note = Description of Artificial Sequence: Synthetic oligonucleotide
  misc_feature 1..20: note = Target: SCN10A; (+) strand; PAM type: YTN; PAM sequence: TTC
  source 1..20: mol_type = other DNA
tatgtgttgtgtgcccaaat

SEQ ID NO: 75748 - DNA, 20 bp, synthetic construct
  misc_feature 1..20: note = Description of Artificial Sequence: Synthetic oligonucleotide
  misc_feature 1..20: note = Target: SCN10A; (+) strand; PAM type: YTN; PAM sequence: CTA
  source 1..20: mol_type = other DNA
tgtgttgtgtgcccaaattc

SEQ ID NO: 75749 - DNA, 20 bp, synthetic construct
  misc_feature 1..20: note = Description of Artificial Sequence: Synthetic oligonucleotide
  misc_feature 1..20: note = Target: SCN10A; (+) strand; PAM type: YTN; PAM sequence: TTG
  source 1..20: mol_type = other DNA
tgtgcccaaattctgattaa

SEQ ID NO: 75750 - DNA, 20 bp, synthetic construct
  misc_feature 1..20: note = Description of Artificial Sequence: Synthetic oligonucleotide
  misc_feature 1..20: note = Target: SCN10A; (+) strand; PAM type: YTN; PAM sequence: TTC
  source 1..20: mol_type = other DNA
tgattaacatggtgtattta

SEQ ID NO: 75751 - DNA, 20 bp, synthetic construct
  misc_feature 1..20: note = Description of Artificial Sequence: Synthetic oligonucleotide
  misc_feature 1..20: note = Target: SCN10A; (+) strand; PAM type: YTN; PAM sequence: CTG
  source 1..20: mol_type = other DNA
attaacatggtgtatttatg

SEQ ID NO: 75752 - DNA, 20 bp, synthetic construct
  misc_feature 1..20: note = Description of Artificial Sequence: Synthetic oligonucleotide
  misc_feature 1..20: note = Target: SCN10A; (+) strand; PAM type: YTN; PAM sequence: TTA
  source 1..20: mol_type = other DNA
acatggtgtatttatgcaat

SEQ ID NO: 75753 - DNA, 20 bp, synthetic construct
  misc_feature 1..20: note = Description of Artificial Sequence: Synthetic oligonucleotide
  misc_feature 1..20: note = Target: SCN10A; (+) strand; PAM type: YTN; PAM sequence: TTT
  source 1..20: mol_type = other DNA
atgcaatgaccattcaaaca

SEQ ID NO: 75754 - DNA, 20 bp, synthetic construct
  misc_feature 1..20: note = Description of Artificial Sequence: Synthetic oligonucleotide
  misc_feature 1..20: note = Target: SCN10A; (+) strand; PAM type: YTN; PAM sequence: TTA
  source 1..20: mol_type = other DNA
tgcaatgaccattcaaacac

SEQ ID NO: 75755 - DNA, 20 bp, synthetic construct
  misc_feature 1..20: note = Description of Artificial Sequence: Synthetic oligonucleotide
  misc_feature 1..20: note = Target: SCN10A; (+) strand; PAM type: YTN; PAM sequence: TTC
  source 1..20: mol_type = other DNA
aaacactgttgacttcagtg

SEQ ID NO: 75756 - DNA, 20 bp, synthetic construct
  misc_feature 1..20: note = Description of Artificial Sequence: Synthetic oligonucleotide
  misc_feature 1..20: note = Target: SCN10A; (+) strand; PAM type: YTN; PAM sequence: CTG
  source 1..20: mol_type = other DNA
ttgacttcagtgtctttaat

SEQ ID NO: 75757 - DNA, 20 bp, synthetic construct
  misc_feature 1..20: note = Description of Artificial Sequence: Synthetic oligonucleotide
  misc_feature 1..20: note = Target: SCN10A; (+) strand; PAM type: YTN; PAM sequence: TTG
  source 1..20: mol_type = other DNA
acttcagtgtctttaattct

SEQ ID NO: 75758 - DNA, 20 bp, synthetic construct
  misc_feature 1..20: note = Description of Artificial Sequence: Synthetic oligonucleotide
  misc_feature 1..20: note = Target: SCN10A; (+) strand; PAM type: YTN; PAM sequence: CTT
  source 1..20: mol_type = other DNA
cagtgtctttaattcttccc

SEQ ID NO: 75759 - DNA, 20 bp, synthetic construct
  misc_feature 1..20: note = Description of Artificial Sequence: Synthetic oligonucleotide
  misc_feature 1..20: note = Target: SCN10A; (+) strand; PAM type: YTN; PAM sequence: TTC
  source 1..20: mol_type = other DNA
agtgtctttaattcttccct

SEQ ID NO: 75760 - DNA, 20 bp, synthetic construct
  misc_feature 1..20: note = Description of Artificial Sequence: Synthetic oligonucleotide
  misc_feature 1..20: note = Target: SCN10A; (+) strand; PAM type: YTN; PAM sequence: CTT
  source 1..20: mol_type = other DNA
taattcttcccttctgagaa

SEQ ID NO: 75761 - DNA, 20 bp, synthetic construct
  misc_feature 1..20: note = Description of Artificial Sequence: Synthetic oligonucleotide
  misc_feature 1..20: note = Target: SCN10A; (+) strand; PAM type: YTN; PAM sequence: TTT
  source 1..20: mol_type = other DNA
aattcttcccttctgagaaa

SEQ ID NO: 75762 - DNA, 20 bp, synthetic construct
  misc_feature 1..20: note = Description of Artificial Sequence: Synthetic oligonucleotide
  misc_feature 1..20: note = Target: SCN10A; (+) strand; PAM type: YTN; PAM sequence: TTA
  source 1..20: mol_type = other DNA
attcttcccttctgagaaac

SEQ ID NO: 75763 - DNA, 20 bp, synthetic construct
  misc_feature 1..20: note = Description of Artificial Sequence: Synthetic oligonucleotide
  misc_feature 1..20: note = Target: SCN10A; (+) strand; PAM type: YTN; PAM sequence: TTC
  source 1..20: mol_type = other DNA
ttcccttctgagaaacaaag

SEQ ID NO: 75764 - DNA, 20 bp, synthetic construct
  misc_feature 1..20: note = Description of Artificial Sequence: Synthetic oligonucleotide
  misc_feature 1..20: note = Target: SCN10A; (+) strand; PAM type: YTN; PAM sequence: CTT
  source 1..20: mol_type = other DNA
cccttctgagaaacaaagat

SEQ ID NO: 75765 - DNA, 20 bp, synthetic construct
  misc_feature 1..20: note = Description of Artificial Sequence: Synthetic oligonucleotide
  misc_feature 1..20: note = Target: SCN10A; (+) strand; PAM type: YTN; PAM sequence: TTC
  source 1..20: mol_type = other DNA
ccttctgagaaacaaagatt

SEQ ID NO: 75766 - DNA, 20 bp, synthetic construct
  misc_feature 1..20: note = Description of Artificial Sequence: Synthetic oligonucleotide
  misc_feature 1..20: note = Target: SCN10A; (+) strand; PAM type: YTN; PAM sequence: CTT
  source 1..20: mol_type = other DNA
ctgagaaacaaagattaagt

SEQ ID NO: 75767 - DNA, 20 bp, synthetic construct
  misc_feature 1..20: note = Description of Artificial Sequence: Synthetic oligonucleotide
  misc_feature 1..20: note = Target: SCN10A; (+) strand; PAM type: YTN; PAM sequence: TTC
  source 1..20: mol_type = other DNA
tgagaaacaaagattaagtt

SEQ ID NO: 75768 - DNA, 20 bp, synthetic construct
  misc_feature 1..20: note = Description of Artificial Sequence: Synthetic oligonucleotide
  misc_feature 1..20: note = Target: SCN10A; (+) strand; PAM type: YTN; PAM sequence: CTG
  source 1..20: mol_type = other DNA
agaaacaaagattaagttaa

SEQ ID NO: 75769 - DNA, 20 bp, synthetic construct
  misc_feature 1..20: note = Description of Artificial Sequence: Synthetic oligonucleotide
  misc_feature 1..20: note = Target: SCN10A; (+) strand; PAM type: YTN; PAM sequence: TTA
  source 1..20: mol_type = other DNA
agttaactttctcttccttg

SEQ ID NO: 75770 - DNA, 20 bp, synthetic construct
  misc_feature 1..20: note = Description of Artificial Sequence: Synthetic oligonucleotide
  misc_feature 1..20: note = Target: SCN10A; (+) strand; PAM type: YTN; PAM sequence: TTA
  source 1..20: mol_type = other DNA
actttctcttccttgtctag

SEQ ID NO: 75771 - DNA, 20 bp, synthetic construct
  misc_feature 1..20: note = Description of Artificial Sequence: Synthetic oligonucleotide
  misc_feature 1..20: note = Target: SCN10A; (+) strand; PAM type: YTN; PAM sequence: CTT
  source 1..20: mol_type = other DNA
tctcttccttgtctagggga

SEQ ID NO: 75772 - DNA, 20 bp, synthetic construct
  misc_feature 1..20: note = Description of Artificial Sequence: Synthetic oligonucleotide
  misc_feature 1..20: note = Target: SCN10A; (+) strand; PAM type: YTN; PAM sequence: TTT
  source 1..20: mol_type = other DNA
ctcttccttgtctaggggag

SEQ ID NO: 75773 - DNA, 20 bp, synthetic construct
  misc_feature 1..20: note = Description of Artificial Sequence: Synthetic oligonucleotide
  misc_feature 1..20: note = Target: SCN10A; (+) strand; PAM type: YTN; PAM sequence: TTC
  source 1..20: mol_type = other DNA
tcttccttgtctaggggaga

SEQ ID NO: 75774 - DNA, 20 bp, synthetic construct
  misc_feature 1..20: note = Description of Artificial Sequence: Synthetic oligonucleotide
  misc_feature 1..20: note = Target: SCN10A; (+) strand; PAM type: YTN; PAM sequence: CTC
  source 1..20: mol_type = other DNA
ttccttgtctaggggagaag

SEQ ID NO: 75775 - DNA, 20 bp, synthetic construct
  misc_feature 1..20: note = Description of Artificial Sequence: Synthetic oligonucleotide
  misc_feature 1..20: note = Target: SCN10A; (+) strand; PAM type: YTN; PAM sequence: CTT
  source 1..20: mol_type = other DNA
ccttgtctaggggagaagag

SEQ ID NO: 75776 - DNA, 20 bp, synthetic construct
  misc_feature 1..20: note = Description of Artificial Sequence: Synthetic oligonucleotide
  misc_feature 1..20: note = Target: SCN10A; (+) strand; PAM type: YTN; PAM sequence: TTC
  source 1..20: mol_type = other DNA
cttgtctaggggagaagaga

SEQ ID NO: 75777 - DNA, 20 bp, synthetic construct
  misc_feature 1..20: note = Description of Artificial Sequence: Synthetic oligonucleotide
  misc_feature 1..20: note = Target: SCN10A; (+) strand; PAM type: YTN; PAM sequence: CTT
  source 1..20: mol_type = other DNA
gtctaggggagaagagatac

SEQ ID NO: 75778 - DNA, 20 bp, synthetic construct
  misc_feature 1..20: note = Description of Artificial Sequence: Synthetic oligonucleotide
  misc_feature 1..20: note = Target: SCN10A; (+) strand; PAM type: YTN; PAM sequence: TTG
  source 1..20: mol_type = other DNA
tctaggggagaagagatact

SEQ ID NO: 75779 - DNA, 20 bp, synthetic construct
  misc_feature 1..20: note = Description of Artificial Sequence: Synthetic oligonucleotide
  misc_feature 1..20: note = Target: SCN10A; (+) strand; PAM type: YTN; PAM sequence: CTA
  source 1..20: mol_type = other DNA
ggggagaagagatacttata

SEQ ID NO: 75780 - DNA, 20 bp, synthetic construct
  misc_feature 1..20: note = Description of Artificial Sequence: Synthetic oligonucleotide
  misc_feature 1..20: note = Target: SCN10A; (+) strand; PAM type: YTN; PAM sequence: CTT
  source 1..20: mol_type = other DNA
atagtttggaaccaaatttg

SEQ ID NO: 75781 - DNA, 20 bp, synthetic construct
  misc_feature 1..20: note = Description of Artificial Sequence: Synthetic oligonucleotide
  misc_feature 1..20: note = Target: SCN10A; (+) strand; PAM type: YTN; PAM sequence: TTA
  source 1..20: mol_type = other DNA
tagtttggaaccaaatttga

SEQ ID NO: 75782 - DNA, 20 bp, synthetic construct
  misc_feature 1..20: note = Description of Artificial Sequence: Synthetic oligonucleotide
  misc_feature 1..20: note = Target: SCN10A; (+) strand; PAM type: YTN; PAM sequence: TTT
  source 1..20: mol_type = other DNA
ggaaccaaatttgaatccca

SEQ ID NO: 75783 - DNA, 20 bp, synthetic construct
  misc_feature 1..20: note = Description of Artificial Sequence: Synthetic oligonucleotide
  misc_feature 1..20: note = Target: SCN10A; (+) strand; PAM type: YTN; PAM sequence: TTG
  source 1..20: mol_type = other DNA
gaaccaaatttgaatcccag

SEQ ID NO: 75784 - DNA, 20 bp, synthetic construct
  misc_feature 1..20: note = Description of Artificial Sequence: Synthetic oligonucleotide
  misc_feature 1..20: note = Target: SCN10A; (+) strand; PAM type: YTN; PAM sequence: TTT
  source 1..20: mol_type = other DNA
gaatcccaggactcagttgt

SEQ ID NO: 75785 - DNA, 20 bp, synthetic construct
  misc_feature 1..20: note = Description of Artificial Sequence: Synthetic oligonucleotide
  misc_feature 1..20: note = Target: SCN10A; (+) strand; PAM type: YTN; PAM sequence: TTG
  source 1..20: mol_type = other DNA
aatcccaggactcagttgtt

SEQ ID NO: 75786 - DNA, 20 bp, synthetic construct
  misc_feature 1..20: note = Description of Artificial Sequence: Synthetic oligonucleotide
  misc_feature 1..20: note = Target: SCN10A; (+) strand; PAM type: YTN; PAM sequence: CTC
  source 1..20: mol_type = other DNA
agttgtttagtaacaatgca

SEQ ID NO: 75787 - DNA, 20 bp, synthetic construct
  misc_feature 1..20: note = Description of Artificial Sequence: Synthetic oligonucleotide
  misc_feature 1..20: note = Target: SCN10A; (+) strand; PAM type: YTN; PAM sequence: TTG
  source 1..20: mol_type = other DNA
tttagtaacaatgcaagaat

SEQ ID NO: 75788 - DNA, 20 bp, synthetic construct
  misc_feature 1..20: note = Description of Artificial Sequence: Synthetic oligonucleotide
  misc_feature 1..20: note = Target: SCN10A; (+) strand; PAM type: YTN; PAM sequence: TTT
  source 1..20: mol_type = other DNA
agtaacaatgcaagaattct

SEQ ID NO: 75789 - DNA, 20 bp, synthetic construct
  misc_feature 1..20: note = Description of Artificial Sequence: Synthetic oligonucleotide
  misc_feature 1..20: note = Target: SCN10A; (+) strand; PAM type: YTN; PAM sequence: TTA
  source 1..20: mol_type = other DNA
gtaacaatgcaagaattctc

SEQ ID NO: 75790 - DNA, 20 bp, synthetic construct
  misc_feature 1..20: note = Description of Artificial Sequence: Synthetic oligonucleotide
  misc_feature 1..20: note = Target: SCN10A; (+) strand; PAM type: YTN; PAM sequence: TTC
  source 1..20: mol_type = other DNA
tctcagtgacactggaatgc

SEQ ID NO: 75791 - DNA, 20 bp, synthetic construct
  misc_feature 1..20: note = Description of Artificial Sequence: Synthetic oligonucleotide
  misc_feature 1..20: note = Target: SCN10A; (+) strand; PAM type: YTN; PAM sequence: CTC
  source 1..20: mol_type = other DNA
tcagtgacactggaatgcaa

SEQ ID NO: 75792 - DNA, 20 bp, synthetic construct
  misc_feature 1..20: note = Description of Artificial Sequence: Synthetic oligonucleotide
  misc_feature 1..20: note = Target: SCN10A; (+) strand; PAM type: YTN; PAM sequence: CTC
  source 1..20: mol_type = other DNA
agtgacactggaatgcaatg

SEQ ID NO: 75793 - DNA, 20 bp, synthetic construct
  misc_feature 1..20: note = Description of Artificial Sequence: Synthetic oligonucleotide
  misc_feature 1..20: note = Target: SCN10A; (+) strand; PAM type: YTN; PAM sequence: CTG
  source 1..20: mol_type = other DNA
gaatgcaatgttgaggattg

SEQ ID NO: 75794 - DNA, 20 bp, synthetic construct
  misc_feature 1..20: note = Description of Artificial Sequence: Synthetic oligonucleotide
  misc_feature 1..20: note = Target: SCN10A; (+) strand; PAM type: YTN; PAM sequence: TTG
  source 1..20: mol_type = other DNA
aggattgagaacaggactaa

SEQ ID NO: 75795 - DNA, 20 bp, synthetic construct
  misc_feature 1..20: note = Description of Artificial Sequence: Synthetic oligonucleotide
  misc_feature 1..20: note = Target: SCN10A; (+) strand; PAM type: YTN; PAM sequence: TTG
  source 1..20: mol_type = other DNA
agaacaggactaagccagaa

SEQ ID NO: 75796 - DNA, 20 bp, synthetic construct
  misc_feature 1..20: note = Description of Artificial Sequence: Synthetic oligonucleotide
  misc_feature 1..20: note = Target: SCN10A; (+) strand; PAM type: YTN; PAM sequence: CTA
  source 1..20: mol_type = other DNA
agccagaattccaggtcctg

SEQ ID NO: 75797 - DNA, 20 bp, synthetic construct
  misc_feature 1..20: note = Description of Artificial Sequence: Synthetic oligonucleotide
  misc_feature 1..20: note = Target: SCN10A; (+) strand; PAM type: YTN; PAM sequence: TTC
  source 1..20: mol_type = other DNA
caggtcctggagctggagct

SEQ ID NO: 75798 - DNA, 20 bp, synthetic construct
  misc_feature 1..20: note = Description of Artificial Sequence: Synthetic oligonucleotide
  misc_feature 1..20: note = Target: SCN10A; (+) strand; PAM type: YTN; PAM sequence: CTG
  source 1..20: mol_type = other DNA
gagctggagcttgaggtcaa

SEQ ID NO: 75799 - DNA, 20 bp, synthetic construct
  misc_feature 1..20: note = Description of Artificial Sequence: Synthetic oligonucleotide
  misc_feature 1..20: note = Target: SCN10A; (+) strand; PAM type: YTN; PAM sequence: CTG
  source 1..20: mol_type = other DNA
gagcttgaggtcaaagcaga

SEQ ID NO: 75800 - DNA, 20 bp, synthetic construct
  misc_feature 1..20: note = Description of Artificial Sequence: Synthetic oligonucleotide
  misc_feature 1..20: note = Target: SCN10A; (+) strand; PAM type: YTN; PAM sequence: CTT
  source 1..20: mol_type = other DNA
gaggtcaaagcagactcagc

SEQ ID NO: 75801 - DNA, 20 bp, synthetic construct
  misc_feature 1..20: note = Description of Artificial Sequence: Synthetic oligonucleotide
  misc_feature 1..20: note = Target: SCN10A; (+) strand; PAM type: YTN; PAM sequence: TTG
  source 1..20: mol_type = other DNA
aggtcaaagcagactcagct

SEQ ID NO: 75802 - DNA, 20 bp, synthetic construct
  misc_feature 1..20: note = Description of Artificial Sequence: Synthetic oligonucleotide
  misc_feature 1..20: note = Target: SCN10A; (+) strand; PAM type: YTN; PAM sequence: CTC
  source 1..20: mol_type = other DNA
agctatgagactgacttcat

SEQ ID NO: 75803 - DNA, 20 bp, synthetic construct
  misc_feature 1..20: note = Description of Artificial Sequence: Synthetic oligonucleotide
  misc_feature 1..20: note = Target: SCN10A; (+) strand; PAM type: YTN; PAM sequence: CTA
  source 1..20: mol_type = other DNA
tgagactgacttcatgccaa

SEQ ID NO: 75804 - DNA, 20 bp, synthetic construct
  misc_feature 1..20: note = Description of Artificial Sequence: Synthetic oligonucleotide
  misc_feature 1..20: note = Target: SCN10A; (+) strand; PAM type: YTN; PAM sequence: CTG
  source 1..20: mol_type = other DNA
acttcatgccaaatgaccat

SEQ ID NO: 75805 - DNA, 20 bp, synthetic construct
  misc_feature 1..20: note = Description of Artificial Sequence: Synthetic oligonucleotide
  misc_feature 1..20: note = Target: SCN10A; (+) strand; PAM type: YTN; PAM sequence: CTT
  source 1..20: mol_type = other DNA
catgccaaatgaccataatt

SEQ ID NO: 75806 - DNA, 20 bp, synthetic construct
  misc_feature 1..20: note = Description of Artificial Sequence: Synthetic oligonucleotide
  misc_feature 1..20: note = Target: SCN10A; (+) strand; PAM type: YTN; PAM sequence: TTC
  source 1..20: mol_type = other DNA
atgccaaatgaccataatta

SEQ ID NO: 75807 - DNA, 20 bp, synthetic construct
  misc_feature 1..20: note = Description of Artificial Sequence: Synthetic oligonucleotide
  misc_feature 1..20: note = Target: SCN10A; (+) strand; PAM type: YTN; PAM sequence: TTA
  source 1..20: mol_type = other DNA
ttctgggctaccataaatcc

SEQ ID NO: 75808 - DNA, 20 bp, synthetic construct
  misc_feature 1..20: note = Description of Artificial Sequence: Synthetic oligonucleotide
  misc_feature 1..20: note = Target: SCN10A; (+) strand; PAM type: YTN; PAM sequence: TTC
  source 1..20: mol_type = other DNA
tgggctaccataaatccctc

SEQ ID NO: 75809 - DNA, 20 bp, synthetic construct
  misc_feature 1..20: note = Description of Artificial Sequence: Synthetic oligonucleotide
  misc_feature 1..20: note = Target: SCN10A; (+) strand; PAM type: YTN; PAM sequence: CTG
  source 1..20: mol_type = other DNA
ggctaccataaatccctcca

SEQ ID NO: 75810 - DNA, 20 bp, synthetic construct
  misc_feature 1..20: note = Description of Artificial Sequence: Synthetic oligonucleotide
  misc_feature 1..20: note = Target: SCN10A; (+) strand; PAM type: YTN; PAM sequence: CTA
  source 1..20: mol_type = other DNA
ccataaatccctccagctaa

SEQ ID NO: 75811 - DNA, 20 bp, synthetic construct
  misc_feature 1..20: note = Description of Artificial Sequence: Synthetic oligonucleotide
  misc_feature 1..20: note = Target: SCN10A; (+) strand; PAM type: YTN; PAM sequence: CTC
  source 1..20: mol_type = other DNA
cagctaaggacaaaattgtt

SEQ ID NO: 75812 - DNA, 20 bp, synthetic construct
  misc_feature 1..20: note = Description of Artificial Sequence: Synthetic oligonucleotide
  misc_feature 1..20: note = Target: SCN10A; (+) strand; PAM type: YTN; PAM sequence: CTA
  source 1..20: mol_type = other DNA
aggacaaaattgttttcaac

SEQ ID NO: 75813 - DNA, 20 bp, synthetic construct
  misc_feature 1..20: note = Description of Artificial Sequence: Synthetic oligonucleotide
  misc_feature 1..20: note = Target: SCN10A; (+) strand; PAM type: YTN; PAM sequence: TTG
  source 1..20: mol_type = other DNA
ttttcaacattggggtggga

SEQ ID NO: 75814 - DNA, 20 bp, synthetic construct
  misc_feature 1..20: note = Description of Artificial Sequence: Synthetic oligonucleotide
  misc_feature 1..20: note = Target: SCN10A; (+) strand; PAM type: YTN; PAM sequence: TTT
  source 1..20: mol_type = other DNA
tcaacattggggtgggaatt

SEQ ID NO: 75815 - DNA, 20 bp, synthetic construct
  misc_feature 1..20: note = Description of Artificial Sequence: Synthetic oligonucleotide
  misc_feature 1..20: note = Target: SCN10A; (+) strand; PAM type: YTN; PAM sequence: TTT
  source 1..20: mol_type = other DNA
caacattggggtgggaattt

SEQ ID NO: 75816 - DNA, 20 bp, synthetic construct
  misc_feature 1..20: note = Description of Artificial Sequence: Synthetic oligonucleotide
  misc_feature 1..20: note = Target: SCN10A; (+) strand; PAM type: YTN; PAM sequence: TTC
  source 1..20: mol_type = other DNA
aacattggggtgggaatttg

SEQ ID NO: 75817 - DNA, 20 bp, synthetic construct
  misc_feature 1..20: note = Description of Artificial Sequence: Synthetic oligonucleotide
  misc_feature 1..20: note = Target: SCN10A; (+) strand; PAM type: YTN; PAM sequence: TTG
  source 1..20: mol_type = other DNA
gggtgggaatttgtagtgat

SEQ ID NO: 75818 - DNA, 20 bp, synthetic construct
  misc_feature 1..20: note = Description of Artificial Sequence: Synthetic oligonucleotide
  misc_feature 1..20: note = Target: SCN10A; (+) strand; PAM type: YTN; PAM sequence: TTT
  source 1..20: mol_type = other DNA
gtagtgatgtgatgtaggta

SEQ ID NO: 75819 - DNA, 20 bp, synthetic construct
  misc_feature 1..20: note = Description of Artificial Sequence: Synthetic oligonucleotide
  misc_feature 1..20: note = Target: SCN10A; (+) strand; PAM type: YTN; PAM sequence: TTG
  source 1..20: mol_type = other DNA
tagtgatgtgatgtaggtat

SEQ ID NO: 75820 - DNA, 20 bp, synthetic construct
  misc_feature 1..20: note = Description of Artificial Sequence: Synthetic oligonucleotide
  misc_feature 1..20: note = Target: SCN10A; (+) strand; PAM type: YTN; PAM sequence: CTT
  source 1..20: mol_type = other DNA
cttttaagactttcccatca

SEQ ID NO: 75821 - DNA, 20 bp, synthetic construct
  misc_feature 1..20: note = Description of Artificial Sequence: Synthetic oligonucleotide
  misc_feature 1..20: note = Target: SCN10A; (+) strand; PAM type: YTN; PAM sequence: TTC
  source 1..20: mol_type = other DNA
ttttaagactttcccatcag

SEQ ID NO: 75822 - DNA, 20 bp, synthetic construct
  misc_feature 1..20: note = Description of Artificial Sequence: Synthetic oligonucleotide
  misc_feature 1..20: note = Target: SCN10A; (+) strand; PAM type: YTN; PAM sequence: CTT
  source 1..20: mol_type = other DNA
ttaagactttcccatcagaa

SEQ ID NO: 75823 - DNA, 20 bp, synthetic construct
  misc_feature 1..20: note = Description of Artificial Sequence: Synthetic oligonucleotide
  misc_feature 1..20: note = Target: SCN10A; (+) strand; PAM type: YTN; PAM sequence: TTT
  source 1..20: mol_type = other DNA
taagactttcccatcagaag

SEQ ID NO: 75824 - DNA, 20 bp, synthetic construct
  misc_feature 1..20: note = Description of Artificial Sequence: Synthetic oligonucleotide
  misc_feature 1..20: note = Target: SCN10A; (+) strand; PAM type: YTN; PAM sequence: TTT
  source 1..20: mol_type = other DNA
aagactttcccatcagaagt

SEQ ID NO: 75825 - DNA, 20 bp, synthetic construct
  misc_feature 1..20: note = Description of Artificial Sequence: Synthetic oligonucleotide
  misc_feature 1..20: note = Target: SCN10A; (+) strand; PAM type: YTN; PAM sequence: TTA
  source 1..20: mol_type = other DNA
agactttcccatcagaagtg

SEQ ID NO: 75826 - DNA, 20 bp, synthetic construct
  misc_feature 1..20: note = Description of Artificial Sequence: Synthetic oligonucleotide
  misc_feature 1..20: note = Target: SCN10A; (+) strand; PAM type: YTN; PAM sequence: CTT
  source 1..20: mol_type = other DNA
tcccatcagaagtgatagct

SEQ ID NO: 75827 - DNA, 20 bp, synthetic construct
  misc_feature 1..20: note = Description of Artificial Sequence: Synthetic oligonucleotide
  misc_feature 1..20: note = Target: SCN10A; (+) strand; PAM type: YTN; PAM sequence: TTT
  source 1..20: mol_type = other DNA
cccatcagaagtgatagctc

SEQ ID NO: 75828 - DNA, 20 bp, synthetic construct
  misc_feature 1..20: note = Description of Artificial Sequence: Synthetic oligonucleotide
  misc_feature 1..20: note = Target: SCN10A; (+) strand; PAM type: YTN; PAM sequence: TTC
  source 1..20: mol_type = other DNA
ccatcagaagtgatagctct

SEQ ID NO: 75829 - DNA, 20 bp, synthetic construct
  misc_feature 1..20: note = Description of Artificial Sequence: Synthetic oligonucleotide
  misc_feature 1..20: note = Target: SCN10A; (+) strand; PAM type: YTN; PAM sequence: CTC
  source 1..20: mol_type = other DNA
tggacttgggatcccttgat

SEQ ID NO: 75830 - DNA, 20 bp, synthetic construct
  misc_feature 1..20: note = Description of Artificial Sequence: Synthetic oligonucleotide
  misc_feature 1..20: note = Target: SCN10A; (+) strand; PAM type: YTN; PAM sequence: CTG
  source 1..20: mol_type = other DNA
gacttgggatcccttgattg

SEQ ID NO: 75831 - DNA, 20 bp, synthetic construct
  misc_feature 1..20: note = Description of Artificial Sequence: Synthetic oligonucleotide
  misc_feature 1..20: note = Target: SCN10A; (+) strand; PAM type: YTN; PAM sequence: CTT
  source 1..20: mol_type = other DNA
gggatcccttgattgaagtg

SEQ ID NO: 75832 - DNA, 20 bp, synthetic construct
  misc_feature 1..20: note = Description of Artificial Sequence: Synthetic oligonucleotide
  misc_feature 1..20: note = Target: SCN10A; (+) strand; PAM type: YTN; PAM sequence: TTG
  source 1..20: mol_type = other DNA
ggatcccttgattgaagtgg

SEQ ID NO: 75833 - DNA, 20 bp, synthetic construct
  misc_feature 1..20: note = Description of Artificial Sequence: Synthetic oligonucleotide
  misc_feature 1..20: note = Target: SCN10A; (+) strand; PAM type: YTN; PAM sequence: CTT
  source 1..20: mol_type = other DNA
gattgaagtggttctctata

SEQ ID NO: 75834 - DNA, 20 bp, synthetic construct
  misc_feature 1..20: note = Description of Artificial Sequence: Synthetic oligonucleotide
  misc_feature 1..20: note = Target: SCN10A; (+) strand; PAM type: YTN; PAM sequence: TTG
  source 1..20: mol_type = other DNA
attgaagtggttctctatat

SEQ ID NO: 75835 - DNA, 20 bp, synthetic construct
  misc_feature 1..20: note = Description of Artificial Sequence: Synthetic oligonucleotide
  misc_feature 1..20: note = Target: SCN10A; (+) strand; PAM type: YTN; PAM sequence: TTG
  source 1..20: mol_type = other DNA
aagtggttctctatattccc

SEQ ID NO: 75836 - DNA, 20 bp, synthetic construct
  misc_feature 1..20: note = Description of Artificial Sequence: Synthetic oligonucleotide
  misc_feature 1..20: note = Target: SCN10A; (+) strand; PAM type: YTN; PAM sequence: TTC
  source 1..20: mol_type = other DNA
tctatattcccatctattac

SEQ ID NO: 75837 - DNA, 20 bp, synthetic construct
  misc_feature 1..20: note = Description of Artificial Sequence: Synthetic oligonucleotide
  misc_feature 1..20: note = Target: SCN10A; (+) strand; PAM type: YTN; PAM sequence: CTC
  source 1..20: mol_type = other DNA
tatattcccatctattaccc

SEQ ID NO: 75838 - DNA, 20 bp, synthetic construct
  misc_feature 1..20: note = Description of Artificial Sequence: Synthetic oligonucleotide
  misc_feature 1..20: note = Target: SCN10A; (+) strand; PAM type: YTN; PAM sequence: CTA
  source 1..20: mol_type = other DNA
tattcccatctattacccag

SEQ ID NO: 75839 - DNA, 20 bp, synthetic construct
  misc_feature 1..20: note = Description of Artificial Sequence: Synthetic oligonucleotide
  misc_feature 1..20: note = Target: SCN10A; (+) strand; PAM type: YTN; PAM sequence: TTC
  source 1..20: mol_type = other DNA
ccatctattacccagtgtct

SEQ ID NO: 75840 - DNA, 20 bp, synthetic construct
  misc_feature 1..20: note = Description of Artificial Sequence: Synthetic oligonucleotide
  misc_feature 1..20: note = Target: SCN10A; (+) strand; PAM type: YTN; PAM sequence: CTA
  source 1..20: mol_type = other DNA
ttacccagtgtctttacatg

SEQ ID NO: 75841 - DNA, 20 bp, synthetic construct
  misc_feature 1..20: note = Description of Artificial Sequence: Synthetic oligonucleotide
  misc_feature 1..20: note = Target: SCN10A; (+) strand; PAM type: YTN; PAM sequence: TTA
  source 1..20: mol_type = other DNA
cccagtgtctttacatgaca

SEQ ID NO: 75842 - DNA, 20 bp, synthetic construct
  misc_feature 1..20: note = Description of Artificial Sequence: Synthetic oligonucleotide
  misc_feature 1..20: note = Target: SCN10A; (+) strand; PAM type: YTN; PAM sequence: CTT
  source 1..20: mol_type = other DNA
tacatgacattctgagaaaa

SEQ ID NO: 75843 - DNA, 20 bp, synthetic construct
  misc_feature 1..20: note = Description of Artificial Sequence: Synthetic oligonucleotide
  misc_feature 1..20: note = Target: SCN10A; (+) strand; PAM type: YTN; PAM sequence: TTT
  source 1..20: mol_type = other DNA
acatgacattctgagaaaac

SEQ ID NO: 75844 - DNA, 20 bp, synthetic construct
  misc_feature 1..20: note = Description of Artificial Sequence: Synthetic oligonucleotide
  misc_feature 1..20: note = Target: SCN10A; (+) strand; PAM type: YTN; PAM sequence: TTA
  source 1..20: mol_type = other DNA
catgacattctgagaaaact

SEQ ID NO: 75845 - DNA, 20 bp, synthetic construct
  misc_feature 1..20: note = Description of Artificial Sequence: Synthetic oligonucleotide
  misc_feature 1..20: note = Target: SCN10A; (+) strand; PAM type: YTN; PAM sequence: TTC
  source 1..20: mol_type = other DNA
tgagaaaactattggggtgc

SEQ ID NO: 75846 - DNA, 20 bp, synthetic construct
  misc_feature 1..20: note = Description of Artificial Sequence: Synthetic oligonucleotide
  misc_feature 1..20: note = Target: SCN10A; (+) strand; PAM type: YTN; PAM sequence: CTG
  source 1..20: mol_type = other DNA
agaaaactattggggtgcaa

SEQ ID NO: 75847 - DNA, 20 bp, synthetic construct
  misc_feature 1..20: note = Description of Artificial Sequence: Synthetic oligonucleotide
  misc_feature 1..20: note = Target: SCN10A; (+) strand; PAM type: YTN; PAM sequence: CTA
  source 1..20: mol_type = other DNA
ttggggtgcaagtagtttat

SEQ ID NO: 75848 - DNA, 20 bp, synthetic construct
  misc_feature 1..20: note = Description of Artificial Sequence: Synthetic oligonucleotide
  misc_feature 1..20: note = Target: SCN10A; (+) strand; PAM type: YTN; PAM sequence: TTG
  source 1..20: mol_type = other DNA
gggtgcaagtagtttatctg

SEQ ID NO: 75849 - DNA, 20 bp, synthetic construct
  misc_feature 1..20: note = Description of Artificial Sequence: Synthetic oligonucleotide
  misc_feature 1..20: note = Target: SCN10A; (+) strand; PAM type: YTN; PAM sequence: TTT
  source 1..20: mol_type = other DNA
atctgagagctatttctagg

SEQ ID NO: 75850 - DNA, 20 bp, synthetic construct
  misc_feature 1..20: note = Description of Artificial Sequence: Synthetic oligonucleotide
  misc_feature 1..20: note = Target: SCN10A; (+) strand; PAM type: YTN; PAM sequence: TTA
  source 1..20: mol_type = other DNA
tctgagagctatttctagga

SEQ ID NO: 75851 - DNA, 20 bp, synthetic construct
  misc_feature 1..20: note = Description of Artificial Sequence: Synthetic oligonucleotide
  misc_feature 1..20: note = Target: SCN10A; (+) strand; PAM type: YTN; PAM sequence: CTG
  source 1..20: mol_type = other DNA
agagctatttctaggaatgt

SEQ ID NO: 75852 - DNA, 20 bp, synthetic construct
  misc_feature 1..20: note = Description of Artificial Sequence: Synthetic oligonucleotide
  misc_feature 1..20: note = Target: SCN10A; (+) strand; PAM type: YTN; PAM sequence: CTA
  source 1..20: mol_type = other DNA
tttctaggaatgtcatagaa

SEQ ID NO: 75853 - DNA, 20 bp, synthetic construct
  misc_feature 1..20: note = Description of Artificial Sequence: Synthetic oligonucleotide
  misc_feature 1..20: note = Target: SCN10A; (+) strand; PAM type: YTN; PAM sequence: TTT
  source 1..20: mol_type = other DNA
ctaggaatgtcatagaagag

SEQ ID NO: 75854 - DNA, 20 bp, synthetic construct
  misc_feature 1..20: note = Description of Artificial Sequence: Synthetic oligonucleotide
  misc_feature 1..20: note = Target: SCN10A; (+) strand; PAM type: YTN; PAM sequence: TTC
  source 1..20: mol_type = other DNA
taggaatgtcatagaagaga

SEQ ID NO: 75855 - DNA, 20 bp, synthetic construct
  misc_feature 1..20: note = Description of Artificial Sequence: Synthetic oligonucleotide
  misc_feature 1..20: note = Target: SCN10A; (+) strand; PAM type: YTN; PAM sequence: CTA
  source 1..20: mol_type = other DNA
ggaatgtcatagaagagagg

SEQ ID NO: 75856 - DNA, 20 bp, synthetic construct
  misc_feature 1..20: note = Description of Artificial Sequence: Synthetic oligonucleotide
  misc_feature 1..20: note = Target: SCN10A; (+) strand; PAM type: YTN; PAM sequence: TTT
  source 1..20: mol_type = other DNA
ttatgagccatttactctta

SEQ ID NO: 75857 - DNA, 20 bp, synthetic construct
  misc_feature 1..20: note = Description of Artificial Sequence: Synthetic oligonucleotide
  misc_feature 1..20: note = Target: SCN10A; (+) strand; PAM type: YTN; PAM sequence: TTT
  source 1..20: mol_type = other DNA
tatgagccatttactcttat

SEQ ID NO: 75858 - DNA, 20 bp, synthetic construct
  misc_feature 1..20: note = Description of Artificial Sequence: Synthetic oligonucleotide
  misc_feature 1..20: note = Target: SCN10A; (+) strand; PAM type: YTN; PAM sequence: TTT
  source 1..20: mol_type = other DNA
atgagccatttactcttatg

SEQ ID NO: 75859 - DNA, 20 bp, synthetic construct
  misc_feature 1..20: note = Description of Artificial Sequence: Synthetic oligonucleotide
  misc_feature 1..20: note = Target: SCN10A; (+) strand; PAM type: YTN; PAM sequence: TTA
  source 1..20: mol_type = other DNA
tgagccatttactcttatgg

SEQ ID NO: 75860 - DNA, 20 bp, synthetic construct
  misc_feature 1..20: note = Description of Artificial Sequence: Synthetic oligonucleotide
  misc_feature 1..20: note = Target: SCN10A; (+) strand; PAM type: YTN; PAM sequence: TTT
  source 1..20: mol_type = other DNA
actcttatgggcaaactggg

SEQ ID NO: 75861 - DNA, 20 bp, synthetic construct
  misc_feature 1..20: note = Description of Artificial Sequence: Synthetic oligonucleotide
  misc_feature 1..20: note = Target: SCN10A; (+) strand; PAM type: YTN; PAM sequence: TTA
  source 1..20: mol_type = other DNA
ctcttatgggcaaactgggc

SEQ ID NO: 75862 - DNA, 20 bp, synthetic construct
  misc_feature 1..20: note = Description of Artificial Sequence: Synthetic oligonucleotide
  misc_feature 1..20: note = Target: SCN10A; (+) strand; PAM type: YTN; PAM sequence: CTC
  source 1..20: mol_type = other DNA
ttatgggcaaactgggctca

SEQ ID NO: 75863 - DNA, 20 bp, synthetic construct
  misc_feature 1..20: note = Description of Artificial Sequence: Synthetic oligonucleotide
  misc_feature 1..20: note = Target: SCN10A; (+) strand; PAM type: YTN; PAM sequence: CTT
  source 1..20: mol_type = other DNA
atgggcaaactgggctcaga

SEQ ID NO: 75864 - DNA, 20 bp, synthetic construct
  misc_feature 1..20: note = Description of Artificial Sequence: Synthetic oligonucleotide
  misc_feature 1..20: note = Target: SCN10A; (+) strand; PAM type: YTN; PAM sequence: TTA
  source 1..20: mol_type = other DNA
tgggcaaactgggctcagaa

SEQ ID NO: 75865 - DNA, 20 bp, synthetic construct
  misc_feature 1..20: note = Description of Artificial Sequence: Synthetic oligonucleotide
  misc_feature 1..20: note = Target: SCN10A; (+) strand; PAM type: YTN; PAM sequence: CTG
  source 1..20: mol_type = other DNA
ggctcagaattgtttcactg

SEQ ID NO: 75866 - DNA, 20 bp, synthetic construct
  misc_feature 1..20: note = Description of Artificial Sequence: Synthetic oligonucleotide
  misc_feature 1..20: note = Target: SCN10A; (+) strand; PAM type: YTN; PAM sequence: CTC
  source 1..20: mol_type = other DNA
agaattgtttcactgagggg

SEQ ID NO: 75867 - DNA, 20 bp, synthetic construct
  misc_feature 1..20: note = Description of Artificial Sequence: Synthetic oligonucleotide
  misc_feature 1..20: note = Target: SCN10A; (+) strand; PAM type: YTN; PAM sequence: TTG
  source 1..20: mol_type = other DNA
tttcactgaggggtaaggat

SEQ ID NO: 75868 - DNA, 20 bp, synthetic construct
  misc_feature 1..20: note = Description of Artificial Sequence: Synthetic oligonucleotide
  misc_feature 1..20: note = Target: SCN10A; (+) strand; PAM type: YTN; PAM sequence: TTT
  source 1..20: mol_type = other DNA
cactgaggggtaaggatact

SEQ ID NO: 75869 - DNA, 20 bp, synthetic construct
  misc_feature 1..20: note = Description of Artificial Sequence: Synthetic oligonucleotide
  misc_feature 1..20: note = Target: SCN10A; (+) strand; PAM type: YTN; PAM sequence: TTC
  source 1..20: mol_type = other DNA
actgaggggtaaggatacta

SEQ ID NO: 75870 - DNA, 20 bp, synthetic construct
  misc_feature 1..20: note = Description of Artificial Sequence: Synthetic oligonucleotide
  misc_feature 1..20: note = Target: SCN10A; (+) strand; PAM type: YTN; PAM sequence: CTG
  source 1..20: mol_type = other DNA
aggggtaaggatactagggt

SEQ ID NO: 75871 - DNA, 20 bp, synthetic construct
  misc_feature 1..20: note = Description of Artificial Sequence: Synthetic oligonucleotide
  misc_feature 1..20: note = Target: SCN10A; (+) strand; PAM type: YTN; PAM sequence: CTA
  source 1..20: mol_type = other DNA
gggttttatctaccagtcct

SEQ ID NO: 75872 - DNA, 20 bp, synthetic construct
  misc_feature 1..20: note = Description of Artificial Sequence: Synthetic oligonucleotide
  misc_feature 1..20: note = Target: SCN10A; (+) strand; PAM type: YTN; PAM sequence: TTT
  source 1..20: mol_type = other DNA
tatctaccagtcctgtccct

SEQ ID NO: 75873 - DNA, 20 bp, synthetic construct
  misc_feature 1..20: note = Description of Artificial Sequence: Synthetic oligonucleotide
  misc_feature 1..20: note = Target: SCN10A; (+) strand; PAM type: YTN; PAM sequence: TTT
  source 1..20: mol_type = other DNA
atctaccagtcctgtccctt

SEQ ID NO: 75874 - DNA, 20 bp, synthetic construct
  misc_feature 1..20: note = Description of Artificial Sequence: Synthetic oligonucleotide
  misc_feature 1..20: note = Target: SCN10A; (+) strand; PAM type: YTN; PAM sequence: TTA
  source 1..20: mol_type = other DNA
tctaccagtcctgtccctta

SEQ ID NO: 75875 - DNA, 20 bp, synthetic construct
  misc_feature 1..20: note = Description of Artificial Sequence: Synthetic oligonucleotide
  misc_feature 1..20: note = Target: SCN10A; (+) strand; PAM type: YTN; PAM sequence: CTA
  source 1..20: mol_type = other DNA
ccagtcctgtcccttattgg

SEQ ID NO: 75876 - DNA, 20 bp, synthetic construct
  misc_feature 1..20: note = Description of Artificial Sequence: Synthetic oligonucleotide
  misc_feature 1..20: note = Target: SCN10A; (+) strand; PAM type: YTN; PAM sequence: CTG
  source 1..20: mol_type = other DNA
tcccttattggttgacggtt

SEQ ID NO: 75877 - DNA, 20 bp, synthetic construct
  misc_feature 1..20: note = Description of Artificial Sequence: Synthetic oligonucleotide
  misc_feature 1..20: note = Target: SCN10A; (+) strand; PAM type: YTN; PAM sequence: CTT
  source 1..20: mol_type = other DNA
attggttgacggttgtcctg

SEQ ID NO: 75878 - DNA, 20 bp, synthetic construct
  misc_feature 1..20: note = Description of Artificial Sequence: Synthetic oligonucleotide
  misc_feature 1..20: note = Target: SCN10A; (+) strand; PAM type: YTN; PAM sequence: TTA
  source 1..20: mol_type = other DNA
ttggttgacggttgtcctgg

SEQ ID NO: 75879 - DNA, 20 bp, synthetic construct
  misc_feature 1..20: note = Description of Artificial Sequence: Synthetic oligonucleotide
  misc_feature 1..20: note = Target: SCN10A; (+) strand; PAM type: YTN; PAM sequence: TTG
  source 1..20: mol_type = other DNA
gttgacggttgtcctgggat

SEQ ID NO: 75880 - DNA, 20 bp, synthetic construct
  misc_feature 1..20: note = Description of Artificial Sequence: Synthetic oligonucleotide
  misc_feature 1..20: note = Target: SCN10A; (+) strand; PAM type: YTN; PAM sequence: TTG
  source 1..20: mol_type = other DNA
acggttgtcctgggatttta

SEQ ID NO: 75881 - DNA, 20 bp, synthetic construct
  misc_feature 1..20: note = Description of Artificial Sequence: Synthetic oligonucleotide
  misc_feature 1..20: note = Target: SCN10A; (+) strand; PAM type: YTN; PAM sequence: TTG
  source 1..20: mol_type = other DNA
tcctgggattttaactctac

SEQ ID NO: 75882 - DNA, 20 bp, synthetic construct
  misc_feature 1..20: note = Description of Artificial Sequence: Synthetic oligonucleotide
  misc_feature 1..20: note = Target: SCN10A; (+) strand; PAM type: YTN; PAM sequence: CTG
  source 1..20: mol_type = other DNA
ggattttaactctacagaac

SEQ ID NO: 75883 - DNA, 20 bp, synthetic construct
  misc_feature 1..20: note = Description of Artificial Sequence: Synthetic oligonucleotide
  misc_feature 1..20: note = Target: SCN10A; (+) strand; PAM type: YTN; PAM sequence: TTT
  source 1..20: mol_type = other DNA
taactctacagaacttactt

SEQ ID NO: 75884 - DNA, 20 bp, synthetic construct
  misc_feature 1..20: note = Description of Artificial Sequence: Synthetic oligonucleotide
  misc_feature 1..20: note = Target: SCN10A; (+) strand; PAM type: YTN; PAM sequence: TTT
  source 1..20: mol_type = other DNA
aactctacagaacttacttc

SEQ ID NO: 75885 - DNA, 20 bp, synthetic construct
  misc_feature 1..20: note = Description of Artificial Sequence: Synthetic oligonucleotide
  misc_feature 1..20: note = Target: SCN10A; (+) strand; PAM type: YTN; PAM sequence: TTA
  source 1..20: mol_type = other DNA
actctacagaacttacttca

SEQ ID NO: 75886 - DNA, 20 bp, synthetic construct
  misc_feature 1..20: note = Description of Artificial Sequence: Synthetic oligonucleotide
  misc_feature 1..20: note = Target: SCN10A; (+) strand; PAM type: YTN; PAM sequence: CTC
  source 1..20: mol_type = other DNA
tacagaacttacttcagtgg

SEQ ID NO: 75887 - DNA, 20 bp, synthetic construct
  misc_feature 1..20: note = Description of Artificial Sequence: Synthetic oligonucleotide
  misc_feature 1..20: note = Target: SCN10A; (+) strand; PAM type: YTN; PAM sequence: CTA
  source 1..20: mol_type = other DNA
cagaacttacttcagtggcc

SEQ ID NO: 75888 - DNA, 20 bp, synthetic construct
  misc_feature 1..20: note = Description of Artificial Sequence: Synthetic oligonucleotide
  misc_feature 1..20: note = Target: SCN10A; (+) strand; PAM type: YTN; PAM sequence: CTT
  source 1..20: mol_type = other DNA
acttcagtggccagagaaag

SEQ ID NO: 75889 - DNA, 20 bp, synthetic construct
  misc_feature 1..20: note = Description of Artificial Sequence: Synthetic oligonucleotide
  misc_feature 1..20: note = Target: SCN10A; (+) strand; PAM type: YTN; PAM sequence: TTA
  source 1..20: mol_type = other DNA
cttcagtggccagagaaagc

SEQ ID NO: 75890 - DNA, 20 bp, synthetic construct
  misc_feature 1..20: note = Description of Artificial Sequence: Synthetic oligonucleotide
  misc_feature 1..20: note = Target: SCN10A; (+) strand; PAM type: YTN; PAM sequence: CTT
  source 1..20: mol_type = other DNA
cagtggccagagaaagccct

SEQ ID NO: 75891 - DNA, 20 bp, synthetic construct
  misc_feature 1..20: note = Description of Artificial Sequence: Synthetic oligonucleotide
  misc_feature 1..20: note = Target: SCN10A; (+) strand; PAM type: YTN; PAM sequence: TTC
  source 1..20: mol_type = other DNA
agtggccagagaaagccctg

SEQ ID NO: 75892 - DNA, 20 bp, synthetic construct
  misc_feature 1..20: note = Description of Artificial Sequence: Synthetic oligonucleotide
  misc_feature 1..20: note = Target: SCN10A; (+) strand; PAM type: YTN; PAM sequence: CTG
  source 1..20: mol_type = other DNA
ggcagacagaggcaggaagt

SEQ ID NO: 75893 - DNA, 20 bp, synthetic construct
  misc_feature 1..20: note = Description of Artificial Sequence: Synthetic oligonucleotide
  misc_feature 1..20: note = Target: SCN10A; (+) strand; PAM type: YTN; PAM sequence: CTG
  source 1..20: mol_type = other DNA
ctggtgacctctggtctaga

SEQ ID NO: 75894 - DNA, 20 bp, synthetic construct
  misc_feature 1..20: note = Description of Artificial Sequence: Synthetic oligonucleotide
  misc_feature 1..20: note = Target: SCN10A; (+) strand; PAM type: YTN; PAM sequence: CTG
  source 1..20: mol_type = other DNA
gtgacctctggtctagatcc

SEQ ID NO: 75895 - DNA, 20 bp, synthetic construct
  misc_feature 1..20: note = Description of Artificial Sequence: Synthetic oligonucleotide
  misc_feature 1..20: note = Target: SCN10A; (+) strand; PAM type: YTN; PAM sequence: CTC
  source 1..20: mol_type = other DNA
tggtctagatccctgggaaa

SEQ ID NO: 75896 - DNA, 20 bp, synthetic construct
  misc_feature 1..20: note = Description of Artificial Sequence: Synthetic oligonucleotide
  misc_feature 1..20: note = Target: SCN10A; (+) strand; PAM type: YTN; PAM sequence: CTG
  source 1..20: mol_type = other DNA
gtctagatccctgggaaatg

SEQ ID NO: 75897 - DNA, 20 bp, synthetic construct
  misc_feature 1..20: note = Description of Artificial Sequence: Synthetic oligonucleotide
  misc_feature 1..20: note = Target: SCN10A; (+) strand; PAM type: YTN; PAM sequence: CTA
  source 1..20: mol_type = other DNA
gatccctgggaaatgagcaa

SEQ ID NO: 75898 - DNA, 20 bp, synthetic construct
  misc_feature 1..20: note = Description of Artificial Sequence: Synthetic oligonucleotide
  misc_feature 1..20: note = Target: SCN10A; (+) strand; PAM type: YTN; PAM sequence: CTG
  source 1..20: mol_type = other DNA
ggaaatgagcaaggtgcaga

SEQ ID NO: 75899 - DNA, 20 bp, synthetic construct
  misc_feature 1..20: note = Description of Artificial Sequence: Synthetic oligonucleotide
  misc_feature 1..20: note = Target: SCN10A; (+) strand; PAM type: YTN; PAM sequence: CTA
  source 1..20: mol_type = other DNA
tagtccttgcaaccttaatt

SEQ ID NO: 75900 - DNA, 20 bp, synthetic construct
  misc_feature 1..20: note = Description of Artificial Sequence: Synthetic oligonucleotide
  misc_feature 1..20: note = Target: SCN10A; (+) strand; PAM type: YTN; PAM sequence: CTT
  source 1..20: mol_type = other DNA
gcaaccttaattgggaatcc

SEQ ID NO: 75901 - DNA, 20 bp, synthetic construct
  misc_feature 1..20: note = Description of Artificial Sequence: Synthetic oligonucleotide
  misc_feature 1..20: note = Target: SCN10A; (+) strand; PAM type: YTN; PAM sequence: TTG
  source 1..20: mol_type = other DNA
caaccttaattgggaatccc

SEQ ID NO: 75902 - DNA, 20 bp, synthetic construct
  misc_feature 1..20: note = Description of Artificial Sequence: Synthetic oligonucleotide
  misc_feature 1..20: note = Target: SCN10A; (+) strand; PAM type: YTN; PAM sequence: CTT
  source 1..20: mol_type = other DNA
aattgggaatccctatttta

SEQ ID NO: 75903 - DNA, 20 bp, synthetic construct
  misc_feature 1..20: note = Description of Artificial Sequence: Synthetic oligonucleotide
  misc_feature 1..20: note = Target: SCN10A; (+) strand; PAM type: YTN; PAM sequence: TTA
  source 1..20: mol_type = other DNA
attgggaatccctattttag

SEQ ID NO: 75904 - DNA, 20 bp, synthetic construct
  misc_feature 1..20: note = Description of Artificial Sequence: Synthetic oligonucleotide
  misc_feature 1..20: note = Target: SCN10A; (+) strand; PAM type: YTN; PAM sequence: TTG
  source 1..20: mol_type = other DNA
ggaatccctattttagagtc

SEQ ID NO: 75905 - DNA, 20 bp, synthetic construct
  misc_feature 1..20: note = Description of Artificial Sequence: Synthetic oligonucleotide
  misc_feature 1..20: note = Target: SCN10A; (+) strand; PAM type: YTN; PAM sequence: CTA
  source 1..20: mol_type = other DNA
ttttagagtctagttgaatg

SEQ ID NO: 75906 - DNA, 20 bp, synthetic construct
  misc_feature 1..20: note = Description of Artificial Sequence: Synthetic oligonucleotide
  misc_feature 1..20: note = Target: SCN10A; (+) strand; PAM type: YTN; PAM sequence: TTT
  source 1..20: mol_type = other DNA
tagagtctagttgaatgtag

SEQ ID NO: 75907 - DNA, 20 bp, synthetic construct
  misc_feature 1..20: note = Description of Artificial Sequence: Synthetic oligonucleotide
  misc_feature 1..20: note = Target: SCN10A; (+) strand; PAM type: YTN; PAM sequence: TTT
  source 1..20: mol_type = other DNA
agagtctagttgaatgtagt

SEQ ID NO: 75908 - DNA, 20 bp, synthetic construct
  misc_feature 1..20: note = Description of Artificial Sequence: Synthetic oligonucleotide
  misc_feature 1..20: note = Target: SCN10A; (+) strand; PAM type: YTN; PAM sequence: TTA
  source 1..20: mol_type = other DNA
gagtctagttgaatgtagtg

SEQ ID NO: 75909 - DNA, 20 bp, synthetic construct
  misc_feature 1..20: note = Description of Artificial Sequence: Synthetic oligonucleotide
  misc_feature 1..20: note = Target: SCN10A; (+) strand; PAM type: YTN; PAM sequence: CTA
  source 1..20: mol_type = other DNA
gttgaatgtagtggggaaag

SEQ ID NO: 75910 - DNA, 20 bp, synthetic construct
  misc_feature 1..20: note = Description of Artificial Sequence: Synthetic oligonucleotide
  misc_feature 1..20: note = Target: SCN10A; (+) strand; PAM type: YTN; PAM sequence: TTG
  source 1..20: mol_type = other DNA
aatgtagtggggaaagcaca

SEQ ID NO: 75911 - DNA, 20 bp, synthetic construct
  misc_feature 1..20: note = Description of Artificial Sequence: Synthetic oligonucleotide
  misc_feature 1..20: note = Target: SCN10A; (+) strand; PAM type: YTN; PAM sequence: CTT
  source 1..20: mol_type = other DNA
tgtgaggtagccatatcaaa

SEQ ID NO: 75912 - DNA, 20 bp, synthetic construct
  misc_feature 1..20: note = Description of Artificial Sequence: Synthetic oligonucleotide
  misc_feature 1..20: note = Target: SCN10A; (+) strand; PAM type: YTN; PAM sequence: TTT
  source 1..20: mol_type = other DNA
gtgaggtagccatatcaaat

SEQ ID NO: 75913 - DNA, 20 bp, synthetic construct
  misc_feature 1..20: note = Description of Artificial Sequence: Synthetic oligonucleotide
  misc_feature 1..20: note = Target: SCN10A; (+) strand; PAM type: YTN; PAM sequence: TTG
  source 1..20: mol_type = other DNA
tgaggtagccatatcaaatg

SEQ ID NO: 75914 - DNA, 20 bp, synthetic construct
  misc_feature 1..20: note = Description of Artificial Sequence: Synthetic oligonucleotide
  misc_feature 1..20: note = Target: SCN10A; (+) strand; PAM type: YTN; PAM sequence: TTA
  source 1..20: mol_type = other DNA
taggattagtctgggcctga

SEQ ID NO: 75915 - DNA, 20 bp, synthetic construct
  misc_feature 1..20: note = Description of Artificial Sequence: Synthetic oligonucleotide
  misc_feature 1..20: note = Target: SCN10A; (+) strand; PAM type: YTN; PAM sequence: TTA
  source 1..20: mol_type = other DNA
gtctgggcctgatactcact

SEQ ID NO: 75916 - DNA, 20 bp, synthetic construct
  misc_feature 1..20: note = Description of Artificial Sequence: Synthetic oligonucleotide
  misc_feature 1..20: note = Target: SCN10A; (+) strand; PAM type: YTN; PAM sequence: CTG
  source 1..20: mol_type = other DNA
ggcctgatactcacttcttg

SEQ ID NO: 75917 - DNA, 20 bp, synthetic construct
  misc_feature 1..20: note = Description of Artificial Sequence: Synthetic oligonucleotide
  misc_feature 1..20: note = Target: SCN10A; (+) strand; PAM type: YTN; PAM sequence: CTG
  source 1..20: mol_type = other DNA
atactcacttcttggattaa

SEQ ID NO: 75918 - DNA, 20 bp, synthetic construct
  misc_feature 1..20: note = Description of Artificial Sequence: Synthetic oligonucleotide
  misc_feature 1..20: note = Target: SCN10A; (+) strand; PAM type: YTN; PAM sequence: CTC
  source 1..20: mol_type = other DNA
acttcttggattaatggctg

SEQ ID NO: 75919 - DNA, 20 bp, synthetic construct
  misc_feature 1..20: note = Description of Artificial Sequence: Synthetic oligonucleotide
  misc_feature 1..20: note = Target: SCN10A; (+) strand; PAM type: YTN; PAM sequence: CTT
  source 1..20: mol_type = other DNA
cttggattaatggctgagga

SEQ ID NO: 75920 - DNA, 20 bp, synthetic construct
  misc_feature 1..20: note = Description of Artificial Sequence: Synthetic oligonucleotide
  misc_feature 1..20: note = Target: SCN10A; (+) strand; PAM type: YTN; PAM sequence: TTC
  source 1..20: mol_type = other DNA
ttggattaatggctgaggag

SEQ ID NO: 75921 - DNA, 20 bp, synthetic construct
  misc_feature 1..20: note = Description of Artificial Sequence: Synthetic oligonucleotide
  misc_feature 1..20: note = Target: SCN10A; (+) strand; PAM type: YTN; PAM sequence: CTT
  source 1..20: mol_type = other DNA
ggattaatggctgaggagga

SEQ ID NO: 75922 - DNA, 20 bp, synthetic construct
  misc_feature 1..20: note = Description of Artificial Sequence: Synthetic oligonucleotide
  misc_feature 1..20: note = Target: SCN10A; (+) strand; PAM type: YTN; PAM sequence: TTG
  source 1..20: mol_type = other DNA
gattaatggctgaggaggag

SEQ ID NO: 75923 - DNA, 20 bp, synthetic construct
  misc_feature 1..20: note = Description of Artificial Sequence: Synthetic oligonucleotide
  misc_feature 1..20: note = Target: SCN10A; (+) strand; PAM type: YTN; PAM sequence: TTA
  source 1..20: mol_type = other DNA
atggctgaggaggagacaat

SEQ ID NO: 75924 - DNA, 20 bp, synthetic construct
  misc_feature 1..20: note = Description of Artificial Sequence: Synthetic oligonucleotide
  misc_feature 1..20: note = Target: SCN10A; (+) strand; PAM type: YTN; PAM sequence: CTG
  source 1..20: mol_type = other DNA
aggaggagacaatccaagaa

SEQ ID NO: 75925 - DNA, 20 bp, synthetic construct
  misc_feature 1..20: note = Description of Artificial Sequence: Synthetic oligonucleotide
  misc_feature 1..20: note = Target: SCN10A; (+) strand; PAM type: YTN; PAM sequence: CTA
  source 1..20: mol_type = other DNA
ttctagtttagctccaagct

SEQ ID NO: 75926 - DNA, 20 bp, synthetic construct
  misc_feature 1..20: note = Description of Artificial Sequence: Synthetic oligonucleotide
  misc_feature 1..20: note = Target: SCN10A; (+) strand; PAM type: YTN; PAM sequence: TTC
  source 1..20: mol_type = other DNA
tagtttagctccaagctcgg

SEQ ID NO: 75927 - DNA, 20 bp, synthetic construct
  misc_feature 1..20: note = Description of Artificial Sequence: Synthetic oligonucleotide
  misc_feature 1..20: note = Target: SCN10A; (+) strand; PAM type: YTN; PAM sequence: CTA
  source 1..20: mol_type = other DNA
gtttagctccaagctcggcc

SEQ ID NO: 75928 - DNA, 20 bp, synthetic construct
  misc_feature 1..20: note = Description of Artificial Sequence: Synthetic oligonucleotide
  misc_feature 1..20: note = Target: SCN10A; (+) strand; PAM type: YTN; PAM sequence: TTT
  source 1..20: mol_type = other DNA
agctccaagctcggccctgg

SEQ ID NO: 75929 - DNA, 20 bp, synthetic construct
  misc_feature 1..20: note = Description of Artificial Sequence: Synthetic oligonucleotide
  misc_feature 1..20: note = Target: SCN10A; (+) strand; PAM type: YTN; PAM sequence: TTA
  source 1..20: mol_type = other DNA
gctccaagctcggccctggc

SEQ ID NO: 75930 - DNA, 20 bp, synthetic construct
  misc_feature 1..20: note = Description of Artificial Sequence: Synthetic oligonucleotide
  misc_feature 1..20: note = Target: SCN10A; (+) strand; PAM type: YTN; PAM sequence: CTC
  source 1..20: mol_type = other DNA
caagctcggccctggctttc

SEQ ID NO: 75931 - DNA, 20 bp, synthetic construct
  misc_feature 1..20: note = Description of Artificial Sequence: Synthetic oligonucleotide
  misc_feature 1..20: note = Target: SCN10A; (+) strand; PAM type: YTN; PAM sequence: CTC
  source 1..20: mol_type = other DNA
ggccctggctttcaaacagt

SEQ ID NO: 75932 - DNA, 20 bp, synthetic construct
  misc_feature 1..20: note = Description of Artificial Sequence: Synthetic oligonucleotide
  misc_feature 1..20: note = Target: SCN10A; (+) strand; PAM type: YTN; PAM sequence: CTG
  source 1..20: mol_type = other DNA
gctttcaaacagtctgcatg

SEQ ID NO: 75933 - DNA, 20 bp, synthetic construct
  misc_feature 1..20: note = Description of Artificial Sequence: Synthetic oligonucleotide
  misc_feature 1..20: note = Target: SCN10A; (+) strand; PAM type: YTN; PAM sequence: CTT
  source 1..20: mol_type = other DNA
tcaaacagtctgcatgagtt

SEQ ID NO: 75934 - DNA, 20 bp, synthetic construct
  misc_feature 1..20: note = Description of Artificial Sequence: Synthetic oligonucleotide
  misc_feature 1..20: note = Target: SCN10A; (+) strand; PAM type: YTN; PAM sequence: TTT
  source 1..20: mol_type = other DNA
caaacagtctgcatgagttt

SEQ ID NO: 75935 - DNA, 20 bp, synthetic construct
  misc_feature 1..20: note = Description of Artificial Sequence: Synthetic oligonucleotide
  misc_feature 1..20: note = Target: SCN10A; (+) strand; PAM type: YTN; PAM sequence: TTC
  source 1..20: mol_type = other DNA
aaacagtctgcatgagtttt

SEQ ID NO: 75936 - DNA, 20 bp, synthetic construct
  misc_feature 1..20: note = Description of Artificial Sequence: Synthetic oligonucleotide
  misc_feature 1..20: note = Target: SCN10A; (+) strand; PAM type: YTN; PAM sequence: CTG
  source 1..20: mol_type = other DNA
catgagtttttgcaggtata

SEQ ID NO: 75937 - DNA, 20 bp, synthetic construct
  misc_feature 1..20: note = Description of Artificial Sequence: Synthetic oligonucleotide
  misc_feature 1..20: note = Target: SCN10A; (+) strand; PAM type: YTN; PAM sequence: TTT
  source 1..20: mol_type = other DNA
ttgcaggtatattcccttaa

SEQ ID NO: 75938 - DNA, 20 bp, synthetic construct
  misc_feature 1..20: note = Description of Artificial Sequence: Synthetic oligonucleotide
  misc_feature 1..20: note = Target: SCN10A; (+) strand; PAM type: YTN; PAM sequence: TTT
  source 1..20: mol_type = other DNA
tgcaggtatattcccttaag

SEQ ID NO: 75939 - DNA, 20 bp, synthetic construct
  misc_feature 1..20: note = Description of Artificial Sequence: Synthetic oligonucleotide
  misc_feature 1..20: note = Target: SCN10A; (+) strand; PAM type: YTN; PAM sequence: TTT
  source 1..20: mol_type = other DNA
gcaggtatattcccttaagt

SEQ ID NO: 75940 - DNA, 20 bp, synthetic construct
  misc_feature 1..20: note = Description of Artificial Sequence: Synthetic oligonucleotide
  misc_feature 1..20: note = Target: SCN10A; (+) strand; PAM type: YTN; PAM sequence: TTG
  source 1..20: mol_type = other DNA
caggtatattcccttaagtt

SEQ ID NO: 75941 - DNA, 20 bp, synthetic construct
  misc_feature 1..20: note = Description of Artificial Sequence: Synthetic oligonucleotide
  misc_feature 1..20: note = Target: SCN10A; (+) strand; PAM type: YTN; PAM sequence: TTC
  source 1..20: mol_type = other DNA
ccttaagtttaatagctgtt

SEQ ID NO: 75942 - DNA, 20 bp, synthetic construct
  misc_feature 1..20: note = Description of Artificial Sequence: Synthetic oligonucleotide
  misc_feature 1..20: note = Target: SCN10A; (+) strand; PAM type: YTN; PAM sequence: CTT
  source 1..20: mol_type = other DNA
aagtttaatagctgttcctg

SEQ ID NO: 75943 - DNA, 20 bp, synthetic construct
  misc_feature 1..20: note = Description of Artificial Sequence: Synthetic oligonucleotide
  misc_feature 1..20: note = Target: SCN10A; (+) strand; PAM type: YTN; PAM sequence: TTA
  source 1..20: mol_type = other DNA
agtttaatagctgttcctgc

SEQ ID NO: 75944 - DNA, 20 bp, synthetic construct
  misc_feature 1..20: note = Description of Artificial Sequence: Synthetic oligonucleotide
  misc_feature 1..20: note = Target: SCN10A; (+) strand; PAM type: YTN; PAM sequence: TTT
  source 1..20: mol_type = other DNA
aatagctgttcctgctaagc

SEQ ID NO: 75945 - DNA, 20 bp, synthetic construct
  misc_feature 1..20: note = Description of Artificial Sequence: Synthetic oligonucleotide
  misc_feature 1..20: note = Target: SCN10A; (+) strand; PAM type: YTN; PAM sequence: TTA
  source 1..20: mol_type = other DNA
atagctgttcctgctaagca

SEQ ID NO: 75946 - DNA, 20 bp, synthetic construct
  misc_feature 1..20: note = Description of Artificial Sequence: Synthetic oligonucleotide
  misc_feature 1..20: note = Target: SCN10A; (+) strand; PAM type: YTN; PAM sequence: CTG
  source 1..20: mol_type = other DNA
ttcctgctaagcaagccttt

SEQ ID NO: 75947 - DNA, 20 bp, synthetic construct
  misc_feature 1..20: note = Description of Artificial Sequence: Synthetic oligonucleotide
  misc_feature 1..20: note = Target: SCN10A; (+) strand; PAM type: YTN; PAM sequence: TTC
  source 1..20: mol_type = other DNA
ctgctaagcaagcctttcta

SEQ ID NO: 75948 - DNA, 20 bp, synthetic construct
  misc_feature 1..20: note = Description of Artificial Sequence: Synthetic oligonucleotide
  misc_feature 1..20: note = Target: SCN10A; (+) strand; PAM type: YTN; PAM sequence: CTG
  source 1..20: mol_type = other DNA
ctaagcaagcctttctattc

SEQ ID NO: 75949 - DNA, 20 bp, synthetic construct
  misc_feature 1..20: note = Description of Artificial Sequence: Synthetic oligonucleotide
  misc_feature 1..20: note = Target: SCN10A; (+) strand; PAM type: YTN; PAM sequence: CTA
  source 1..20: mol_type = other DNA
agcaagcctttctattcggt

SEQ ID NO: 75950 - DNA, 20 bp, synthetic construct
  misc_feature 1..20: note = Description of Artificial Sequence: Synthetic oligonucleotide
  misc_feature 1..20: note = Target: SCN10A; (+) strand; PAM type: YTN; PAM sequence: CTT
  source 1..20: mol_type = other DNA
tctattcggtgggcattcag

SEQ ID NO: 75951 - DNA, 20 bp, synthetic construct
  misc_feature 1..20: note = Description of Artificial Sequence: Synthetic oligonucleotide
  misc_feature 1..20: note = Target: SCN10A; (+) strand; PAM type: YTN; PAM sequence: TTT
  source 1..20: mol_type = other DNA
ctattcggtgggcattcagc

SEQ ID NO: 75952 - DNA, 20 bp, synthetic construct
  misc_feature 1..20: note = Description of Artificial Sequence: Synthetic oligonucleotide
  misc_feature 1..20: note = Target: SCN10A; (+) strand; PAM type: YTN; PAM sequence: TTC
  source 1..20: mol_type = other DNA
tattcggtgggcattcagcc

SEQ ID NO: 75953 - DNA, 20 bp, synthetic construct
  misc_feature 1..20: note = Description of Artificial Sequence: Synthetic oligonucleotide
  misc_feature 1..20: note = Target: SCN10A; (+) strand; PAM type: YTN; PAM sequence: CTA
  source 1..20: mol_type = other DNA
ttcggtgggcattcagccct

SEQ ID NO: 75954 - DNA, 20 bp, synthetic construct
  misc_feature 1..20: note = Description of Artificial Sequence: Synthetic oligonucleotide
  misc_feature 1..20: note = Target: SCN10A; (+) strand; PAM type: YTN; PAM sequence: TTC
  source 1..20: mol_type = other DNA
ggtgggcattcagccctccc

SEQ ID NO: 75955 - DNA, 20 bp, synthetic construct
  misc_feature 1..20: note = Description of Artificial Sequence: Synthetic oligonucleotide
  misc_feature 1..20: note = Target: SCN10A; (+) strand; PAM type: YTN; PAM sequence: TTC
  source 1..20: mol_type = other DNA
agccctcccaagatgaacca

SEQ ID NO: 75956 - DNA, 20 bp, synthetic construct
  misc_feature 1..20: note = Description of Artificial Sequence: Synthetic oligonucleotide
  misc_feature 1..20: note = Target: SCN10A; (+) strand; PAM type: YTN; PAM sequence: CTC
  source 1..20: mol_type = other DNA
ccaagatgaaccaacagcga

SEQ ID NO: 75957 - DNA, 20 bp, synthetic construct
  misc_feature 1..20: note = Description of Artificial Sequence: Synthetic oligonucleotide
  misc_feature 1..20: note = Target: SCN10A; (+) strand; PAM type: YTN; PAM sequence: TTT
  source 1..20: mol_type = other DNA
ggttccccttgcctcctttt

SEQ ID NO: 75958 - DNA, 20 bp, synthetic construct
  misc_feature 1..20: note = Description of Artificial Sequence: Synthetic oligonucleotide
  misc_feature 1..20: note = Target: SCN10A; (+) strand; PAM type: YTN; PAM sequence: TTG
  source 1..20: mol_type = other DNA
gttccccttgcctccttttt

SEQ ID NO: 75959 - DNA, 20 bp, synthetic construct
  misc_feature 1..20: note = Description of Artificial Sequence: Synthetic oligonucleotide
  misc_feature 1..20: note = Target: SCN10A; (+) strand; PAM type: YTN; PAM sequence: TTC
  source 1..20: mol_type = other DNA
cccttgcctccttttttttt

SEQ ID NO: 75960 - DNA, 20 bp, synthetic construct
  misc_feature 1..20: note = Description of Artificial Sequence: Synthetic oligonucleotide
  misc_feature 1..20: note = Target: SCN10A; (+) strand; PAM type: YTN; PAM sequence: CTT
  source 1..20: mol_type = other DNA
gcctcctttttttttttttt

SEQ ID NO: 75961 - DNA, 20 bp, synthetic construct
  misc_feature 1..20: note = Description of Artificial Sequence: Synthetic oligonucleotide
  misc_feature 1..20: note = Target: SCN10A; (+) strand; PAM type: YTN; PAM sequence: TTG
  source 1..20: mol_type = other DNA
cctccttttttttttttttt

SEQ ID NO: 75962 - DNA, 20 bp, synthetic construct
  misc_feature 1..20: note = Description of Artificial Sequence: Synthetic oligonucleotide
  misc_feature 1..20: note = Target: SCN10A; (+) strand; PAM type: YTN; PAM sequence: CTC
  source 1..20: mol_type = other DNA
cttttttttttttttttttt

SEQ ID NO: 75963 - DNA, 20 bp, synthetic construct
  misc_feature 1..20: note = Description of Artificial Sequence: Synthetic oligonucleotide
  misc_feature 1..20: note = Target: SCN10A; (+) strand; PAM type: YTN; PAM sequence: CTT
  source 1..20: mol_type = other DNA
tttttttttttttttttttg

SEQ ID NO: 75964 - DNA, 20 bp, synthetic construct
  misc_feature 1..20: note = Description of Artificial Sequence: Synthetic oligonucleotide
  misc_feature 1..20: note = Target: SCN10A; (+) strand; PAM type: YTN; PAM sequence: TTT
  source 1..20: mol_type = other DNA
ttttttttttttttttttga

SEQ ID NO: 75965 - DNA, 20 bp, synthetic construct
  misc_feature 1..20: note = Description of Artificial Sequence: Synthetic oligonucleotide
  misc_feature 1..20: note = Target: SCN10A; (+) strand; PAM type: YTN; PAM sequence: TTT
  source 1..20: mol_type = other DNA
tttttttttttttttttgag

SEQ ID NO: 75966 - DNA, 20 bp, synthetic construct
  misc_feature 1..20: note = Description of Artificial Sequence: Synthetic oligonucleotide
  misc_feature 1..20: note = Target: SCN10A; (+) strand; PAM type: YTN; PAM sequence: TTT
  source 1..20: mol_type = other DNA
ttttttttttttttttgaga

SEQ ID NO: 75967 - DNA, 20 bp, synthetic construct
  misc_feature 1..20: note = Description of Artificial Sequence: Synthetic oligonucleotide
  misc_feature 1..20: note = Target: SCN10A; (+) strand; PAM type: YTN; PAM sequence: TTT
  source 1..20: mol_type = other DNA
tttttttttttttttgagac

SEQ ID NO: 75968 - DNA, 20 bp, synthetic construct
  misc_feature 1..20: note = Description of Artificial Sequence: Synthetic oligonucleotide
  misc_feature 1..20: note = Target: SCN10A; (+) strand; PAM type: YTN; PAM sequence: TTT
  source 1..20: mol_type = other DNA
ttttttttttttttgagaca

SEQ ID NO: 75969 - DNA, 20 bp, synthetic construct
  misc_feature 1..20: note = Description of Artificial Sequence: Synthetic oligonucleotide
  misc_feature 1..20: note = Target: SCN10A; (+) strand; PAM type: YTN; PAM sequence: TTT
  source 1..20: mol_type = other DNA
tttttttttttttgagacaa

SEQ ID NO: 75970 - DNA, 20 bp, synthetic construct
  misc_feature 1..20: note = Description of Artificial Sequence: Synthetic oligonucleotide
  misc_feature 1..20: note = Target: SCN10A; (+) strand; PAM type: YTN; PAM sequence: TTT
  source 1..20: mol_type = other DNA
ttttttttttttgagacaag

SEQ ID NO: 75971 - DNA, 20 bp, synthetic construct
  misc_feature 1..20: note = Description of Artificial Sequence: Synthetic oligonucleotide
  misc_feature 1..20: note = Target: SCN10A; (+) strand; PAM type: YTN; PAM sequence: TTT
  source 1..20: mol_type = other DNA
tttttttttttgagacaagt

SEQ ID NO: 75972 - DNA, 20 bp, synthetic construct
  misc_feature 1..20: note = Description of Artificial Sequence: Synthetic oligonucleotide
  misc_feature 1..20: note = Target: SCN10A; (+) strand; PAM type: YTN; PAM sequence: TTT
  source 1..20: mol_type = other DNA
ttttttttttgagacaagtt

SEQ ID NO: 75973 - DNA, 20 bp, synthetic construct
  misc_feature 1..20: note = Description of Artificial Sequence: Synthetic oligonucleotide
  misc_feature 1..20: note = Target: SCN10A; (+) strand; PAM type: YTN; PAM sequence: TTT
  source 1..20: mol_type = other DNA
tttttttttgagacaagttc

SEQ ID NO: 75974 - DNA, 20 bp, synthetic construct
  misc_feature 1..20: note = Description of Artificial Sequence: Synthetic oligonucleotide
  misc_feature 1..20: note = Target: SCN10A; (+) strand; PAM type: YTN; PAM sequence: TTT
  source 1..20: mol_type = other DNA
ttttttttgagacaagttct

SEQ ID NO: 75975 - DNA, 20 bp, synthetic construct
  misc_feature 1..20: note = Description of Artificial Sequence: Synthetic oligonucleotide
  misc_feature 1..20: note = Target: SCN10A; (+) strand; PAM type: YTN; PAM sequence: TTT
  source 1..20: mol_type = other DNA
tttttttgagacaagttctc

SEQ ID NO: 75976 - DNA, 20 bp, synthetic construct
  misc_feature 1..20: note = Description of Artificial Sequence: Synthetic oligonucleotide
  misc_feature 1..20: note = Target: SCN10A; (+) strand; PAM type: YTN; PAM sequence: TTT
  source 1..20: mol_type = other DNA
ttttttgagacaagttctca

SEQ ID NO: 75977 - DNA, 20 bp, synthetic construct
  misc_feature 1..20: note = Description of Artificial Sequence: Synthetic oligonucleotide
  misc_feature 1..20: note = Target: SCN10A; (+) strand; PAM type: YTN; PAM sequence: TTT
  source 1..20: mol_type = other DNA
tttttgagacaagttctcac

SEQ ID NO: 75978 - DNA, 20 bp, synthetic construct
  misc_feature 1..20: note = Description of Artificial Sequence: Synthetic oligonucleotide
  misc_feature 1..20: note = Target: SCN10A; (+) strand; PAM type: YTN; PAM sequence: TTT
  source 1..20: mol_type = other DNA
ttttgagacaagttctcact

SEQ ID NO: 75979 - DNA, 20 bp, synthetic construct
  misc_feature 1..20: note = Description of Artificial Sequence: Synthetic oligonucleotide
  misc_feature 1..20: note = Target: SCN10A; (+) strand; PAM type: YTN; PAM sequence: TTT
  source 1..20: mol_type = other DNA
tttgagacaagttctcactc

SEQ ID NO: 75980 - DNA, 20 bp, synthetic construct
  misc_feature 1..20: note = Description of Artificial Sequence: Synthetic oligonucleotide
  misc_feature 1..20: note = Target: SCN10A; (+) strand; PAM type: YTN; PAM sequence: TTT
  source 1..20: mol_type = other DNA
ttgagacaagttctcactct

SEQ ID NO: 75981 - DNA, 20 bp, synthetic construct
  misc_feature 1..20: note = Description of Artificial Sequence: Synthetic oligonucleotide
  misc_feature 1..20: note = Target: SCN10A; (+) strand; PAM type: YTN; PAM sequence: TTT
  source 1..20: mol_type = other DNA
tgagacaagttctcactctg

SEQ ID NO: 75982 - DNA, 20 bp, synthetic construct
  misc_feature 1..20: note = Description of Artificial Sequence: Synthetic oligonucleotide
  misc_feature 1..20: note = Target: SCN10A; (+) strand; PAM type: YTN; PAM sequence: TTT
  source 1..20: mol_type = other DNA
gagacaagttctcactctgt

SEQ ID NO: 75983 - DNA, 20 bp, synthetic construct
  misc_feature 1..20: note = Description of Artificial Sequence: Synthetic oligonucleotide
  misc_feature 1..20: note = Target: SCN10A; (+) strand; PAM type: YTN; PAM sequence: TTG
  source 1..20: mol_type = other DNA
agacaagttctcactctgtt

SEQ ID NO: 75984 - DNA, 20 bp, synthetic construct
  misc_feature 1..20: note = Description of Artificial Sequence: Synthetic oligonucleotide
  misc_feature 1..20: note = Target: SCN10A; (+) strand; PAM type: YTN; PAM sequence: TTC
  source 1..20: mol_type = other DNA
tcactctgttgtccaggctg

SEQ ID NO: 75985 - DNA, 20 bp, synthetic construct
  misc_feature 1..20: note = Description of Artificial Sequence: Synthetic oligonucleotide
  misc_feature 1..20: note = Target: SCN10A; (+) strand; PAM type: YTN; PAM sequence: CTC
  source 1..20: mol_type = other DNA
actctgttgtccaggctgga

SEQ ID NO: 75986 - DNA, 20 bp, synthetic construct
  misc_feature 1..20: note = Description of Artificial Sequence: Synthetic oligonucleotide
  misc_feature 1..20: note = Target: SCN10A; (+) strand; PAM type: YTN; PAM sequence: CTC
  source 1..20: mol_type = other DNA
tgttgtccaggctggagtgc

SEQ ID NO: 75987 - DNA, 20 bp, synthetic construct
  misc_feature 1..20: note = Description of Artificial Sequence: Synthetic oligonucleotide
  misc_feature 1..20: note = Target: SCN10A; (+) strand; PAM type: YTN; PAM sequence: CTG
  source 1..20: mol_type = other DNA
ttgtccaggctggagtgcag

SEQ ID NO: 75988 - DNA, 20 bp, synthetic construct
  misc_feature 1..20: note = Description of Artificial Sequence: Synthetic oligonucleotide
  misc_feature 1..20: note = Target: SCN10A; (+) strand; PAM type: YTN; PAM sequence: TTG
  source 1..20: mol_type = other DNA
tccaggctggagtgcagtgg

SEQ ID NO: 75989 - DNA, 20 bp, synthetic construct
  misc_feature 1..20: note = Description of Artificial Sequence: Synthetic oligonucleotide
  misc_feature 1..20: note = Target: SCN10A; (+) strand; PAM type: YTN; PAM sequence: CTG
  source 1..20: mol_type = other DNA
gagtgcagtggcacaatcac

SEQ ID NO: 75990 - DNA, 20 bp, synthetic construct
  misc_feature 1..20: note = Description of Artificial Sequence: Synthetic oligonucleotide
  misc_feature 1..20: note = Target: SCN10A; (+) strand; PAM type: YTN; PAM sequence: CTC
  source 1..20: mol_type = other DNA
attgcagccttgacctccca

SEQ ID NO: 75991 - DNA, 20 bp, synthetic construct
  misc_feature 1..20: note = Description of Artificial Sequence: Synthetic oligonucleotide
  misc_feature 1..20: note = Target: SCN10A; (+) strand; PAM type: YTN; PAM sequence: TTG
  source 1..20: mol_type = other DNA
cagccttgacctcccatgtt

SEQ ID NO: 75992 - DNA, 20 bp, synthetic construct
  misc_feature 1..20: note = Description of Artificial Sequence: Synthetic oligonucleotide
  misc_feature 1..20: note = Target: SCN10A; (+) strand; PAM type: YTN; PAM sequence: CTT
  source 1..20: mol_type = other DNA
gacctcccatgttcaagtga

SEQ ID NO: 75993 - DNA, 20 bp, synthetic construct
  misc_feature 1..20: note = Description of Artificial Sequence: Synthetic oligonucleotide
  misc_feature 1..20: note = Target: SCN10A; (+) strand; PAM type: YTN; PAM sequence: TTG
  source 1..20: mol_type = other DNA
acctcccatgttcaagtgat

SEQ ID NO: 75994 - DNA, 20 bp, synthetic construct
  misc_feature 1..20: note = Description of Artificial Sequence: Synthetic oligonucleotide
  misc_feature 1..20: note = Target: SCN10A; (+) strand; PAM type: YTN; PAM sequence: CTC
  source 1..20: mol_type = other DNA
ccatgttcaagtgatcctcc

SEQ ID NO: 75995 - DNA, 20 bp, synthetic construct
  misc_feature 1..20: note = Description of Artificial Sequence: Synthetic oligonucleotide
  misc_feature 1..20: note = Target: SCN10A; (+) strand; PAM type: YTN; PAM sequence: TTC
  source 1..20: mol_type = other DNA
aagtgatcctcccacctcag

SEQ ID NO: 75996 - DNA, 20 bp, synthetic construct
  misc_feature 1..20: note = Description of Artificial Sequence: Synthetic oligonucleotide
  misc_feature 1..20: note = Target: SCN10A; (+) strand; PAM type: YTN; PAM sequence: CTC
  source 1..20: mol_type = other DNA
ccacctcagcctcccaagta

SEQ ID NO: 75997 - DNA, 20 bp, synthetic construct
  misc_feature 1..20: note = Description of Artificial Sequence: Synthetic oligonucleotide
  misc_feature 1..20: note = Target: SCN10A; (+) strand; PAM type: YTN; PAM sequence: CTC
  source 1..20: mol_type = other DNA
agcctcccaagtagtggaac

SEQ ID NO: 75998 - DNA, 20 bp, synthetic construct
  misc_feature 1..20: note = Description of Artificial Sequence: Synthetic oligonucleotide
  misc_feature 1..20: note = Target: SCN10A; (+) strand; PAM type: YTN; PAM sequence: CTC
  source 1..20: mol_type = other DNA
ccaagtagtggaactacagg

SEQ ID NO: 75999 - DNA, 20 bp, synthetic construct
  misc_feature 1..20: note = Description of Artificial Sequence: Synthetic oligonucleotide
  misc_feature 1..20: note = Target: SCN10A; (+) strand; PAM type: YTN; PAM sequence: CTA
  source 1..20: mol_type = other DNA
caggtatgtgccaccacgcc

SEQ ID NO: 76000 - DNA, 20 bp, synthetic construct
  misc_feature 1..20: note = Description of Artificial Sequence: Synthetic oligonucleotide
  misc_feature 1..20: note = Target: SCN10A; (+) strand; PAM type: YTN; PAM sequence: CTG
  source 1..20: mol_type = other DNA
gctaatcttcatatttttga

SEQ ID NO: 76001 - DNA, 20 bp, synthetic construct
  misc_feature 1..20: note = Description of Artificial Sequence: Synthetic oligonucleotide
  misc_feature 1..20: note = Target: SCN10A; (+) strand; PAM type: YTN; PAM sequence: CTA
  source 1..20: mol_type = other DNA
atcttcatatttttgatggg

SEQ ID NO: 76002 - DNA, 20 bp, synthetic construct
  misc_feature 1..20: note = Description of Artificial Sequence: Synthetic oligonucleotide
  misc_feature 1..20: note = Target: SCN10A; (+) strand; PAM type: YTN; PAM sequence: CTT
  source 1..20: mol_type = other DNA
catatttttgatggggtttt

SEQ ID NO: 76003 - DNA, 20 bp, synthetic construct
  misc_feature 1..20: note = Description of Artificial Sequence: Synthetic oligonucleotide
  misc_feature 1..20: note = Target: SCN10A; (+) strand; PAM type: YTN; PAM sequence: TTC
  source 1..20: mol_type = other DNA
atatttttgatggggttttt

SEQ ID NO: 76004 - DNA, 20 bp, synthetic construct
  misc_feature 1..20: note = Description of Artificial Sequence: Synthetic oligonucleotide
  misc_feature 1..20: note = Target: SCN10A; (+) strand; PAM type: YTN; PAM sequence: TTT
  source 1..20: mol_type = other DNA
ttgatggggtttttccatgt

SEQ ID NO: 76005 - DNA, 20 bp, synthetic construct
  misc_feature 1..20: note = Description of Artificial Sequence: Synthetic oligonucleotide
  misc_feature 1..20: note = Target: SCN10A; (+) strand; PAM type: YTN; PAM sequence: TTT
  source 1..20: mol_type = other DNA
tgatggggtttttccatgtt

SEQ ID NO: 76006 - DNA, 20 bp, synthetic construct
  misc_feature 1..20: note = Description of Artificial Sequence: Synthetic oligonucleotide
  misc_feature 1..20: note = Target: SCN10A; (+) strand; PAM type: YTN; PAM sequence: TTT
  source 1..20: mol_type = other DNA
gatggggtttttccatgttc

SEQ ID NO: 76007 - DNA, 20 bp, synthetic construct
  misc_feature 1..20: note = Description of Artificial Sequence: Synthetic oligonucleotide
  misc_feature 1..20: note = Target: SCN10A; (+) strand; PAM type: YTN; PAM sequence: TTG
  source 1..20: mol_type = other DNA
atggggtttttccatgttcc

SEQ ID NO: 76008 - DNA, 20 bp, synthetic construct
  misc_feature 1..20: note = Description of Artificial Sequence: Synthetic oligonucleotide
  misc_feature 1..20: note = Target: SCN10A; (+) strand; PAM type: YTN; PAM sequence: TTT
  source 1..20: mol_type = other DNA
ttccatgttccccaggctgg

SEQ ID NO: 76009 - DNA, 20 bp, synthetic construct
  misc_feature 1..20: note = Description of Artificial Sequence: Synthetic oligonucleotide
  misc_feature 1..20: note = Target: SCN10A; (+) strand; PAM type: YTN; PAM sequence: TTT
  source 1..20: mol_type = other DNA
tccatgttccccaggctggt

SEQ ID NO: 76010 - DNA, 20 bp, synthetic construct
  misc_feature 1..20: note = Description of Artificial Sequence: Synthetic oligonucleotide
  misc_feature 1..20: note = Target: SCN10A; (+) strand; PAM type: YTN; PAM sequence: TTT
  source 1..20: mol_type = other DNA
ccatgttccccaggctggtc

SEQ ID NO: 76011 - DNA, 20 bp, synthetic construct
  misc_feature 1..20: note = Description of Artificial Sequence: Synthetic oligonucleotide
  misc_feature 1..20: note = Target: SCN10A; (+) strand; PAM type: YTN; PAM sequence: TTC
  source 1..20: mol_type = other DNA
catgttccccaggctggtct

SEQ ID NO: 76012 - DNA, 20 bp, synthetic construct
  misc_feature 1..20: note = Description of Artificial Sequence: Synthetic oligonucleotide
  misc_feature 1..20: note = Target: SCN10A; (+) strand; PAM type: YTN; PAM sequence: TTC
  source 1..20: mol_type = other DNA
cccaggctggtctcaaactc

SEQ ID NO: 76013-76043 - skipped (31 entries)

SEQ ID NO: 76044 - RNA, 100 nt, synthetic construct
  misc_feature 1..100: note = chemically synthesized
  misc_difference 1..20: note = modified_base - n is a, c, g, u, or other
  source 1..100: mol_type = other RNA
nnnnnnnnnnnnnnnnnnnngttttagagctagaaatagcaagttaaaataaggctagtccgttatcaacttgaaaaagtggcaccgagtcggtgctttt

SEQ ID NO: 76045 - RNA, 96 nt, synthetic construct
  misc_feature 1..96: note = chemically synthesized
  misc_difference 1..20: note = modified_base - n is a, c, g, u, or other
  source 1..96: mol_type = other RNA
nnnnnnnnnnnnnnnnnnnngttttagagctagaaatagcaagttaaaataaggctagtccgttatcaacttgaaaaagtggcaccgagtcggtgc

SEQ ID NO: 76046 - RNA, 114 nt, synthetic construct
  misc_feature 1..114: note = chemically synthesized
  misc_difference 1..30: note = modified_base - n is a, c, g, u, or other
  misc_difference 1..30: note = modified_base - this region may encompass 17-30 nucleotides;
  misc_difference 107..114: note = modified_base - This region may encompass 1-8 urasil;
  source 1..114: mol_type = other RNA
nnnnnnnnnnnnnnnnnnnnnnnnnnnnnngttttagagctagaaatagcaagttaaaataaggctagtccgttatcaacttgaaaaagtggcaccgagtcggtgctttttttt
